(19) United States
(12) Patent Application Publication
(10) Pub. No.: US 2024/0299587 A1
(43) Pub. Date: Sep. 12, 2024

(54) NOVEL DRUGGABLE REGIONS IN THE HUMAN CYTOMEGALOVIRUS GLYCOPROTEIN B POLYPEPTIDE AND METHODS OF USE THEREOF

(71) Applicant: Pfizer Inc., New York, NY (US)

(72) Inventors: Xiaoyuan Sherry Chi, Tenafly, NJ (US); Philip Ralph Dormitzer, Sherborn, MA (US); Weifeng Liu, Morris Plains, NJ (US); Yuhang Liu, South Glastonbury, CT (US)

(21) Appl. No.: 18/277,425

(22) PCT Filed: Feb. 21, 2022
(86) PCT No.: PCT/IB2022/051504

§ 371 Date: Aug. 16, 2023

Related U.S. Application Data
(60) Provisional application No. 63/306,669, filed on Feb. 4, 2022.
(60) Provisional application No. 63/153,164, filed on Feb. 24, 2021.

(51) Int. Cl. A61K 49/00; A61K 38/16; A61P 31/22

(52) U.S. Cl. CPC A61K 49/0004; A61K 38/162; A61P 31/22

(57) ABSTRACT

The present invention relates to a method for identifying a candidate therapeutic for a disease caused by infection with a human cytomegalovirus (HCMV) having a glycoprotein B (gB) polypeptide, comprising contacting the HCMV gB polypeptide comprising a druggable region with a compound, wherein binding of said compound indicates a candidate therapeutic. The present invention also relates to candidate therapeutics comprising modulators and inhibitors of HCMV activity and pharmaceutical compositions comprising said modulators and inhibitors and methods of use thereof.

### RELATED APPLICATIONS

[0001] This application claims priority to U.S. Provisional Application No. 63/153,164 filed Feb. 24, 2021 and U.S. Provisional Application No. 63/306,669 filed Feb. 4, 2022. The entire content of each of the foregoing applications is herein incorporated by reference in its entirety.

### REFERENCE TO SEQUENCE LISTING

[0002] This application is being filed electronically via EFS-Web and includes an electronically submitted sequence listing in .txt format. The .txt file contains a sequence listing entitled “PC72715_Feb2022_ST25.txt” created on Feb. 3, 2022 and having a size of 1,374 KB. The sequence listing contained in this .txt file is part of the specification and is incorporated herein by reference in its entirety.

### FIELD OF THE INVENTION

[0003] The present invention relates to novel druggable regions in the human cytomegalovirus (HCMV) glycoprotein B (gB) polyeptide and methods of using same, e.g. for drug discovery.

### BACKGROUND OF THE INVENTION

[0004] Human cytomegalovirus (HCMV) is a double stranded DNA virus of the ß-herpesvirus family. HCMV is the leading cause of congenital and neonatal hearing loss resulting from vertical virus transmission following infection or reactivation of latent virus in pregnant women. In addition, HCMV is a common opportunistic pathogen affecting immunosuppressed patients, such as solid organ and stem cell transplant patients, AIDS patients, etc. Though development of a vaccine against HCMV has been listed as a top priority by the Institute of Medicine, none has been licensed to date.

[0005] The HCMV genome encodes several envelope glycoproteins, one of which is glycoprotein B (gB). Glycoprotein B is a fusogen that is required for virus entry into cells and an important target for neutralizing antibody (nAb) responses to infection. HCMV vaccines that incorporate gB subunit antigens have been under development.

[0006] Because fusion is a key step in viral infectivity, identification of druggable regions within the gB protein will further identification and development of therapeutics that can specifically inhibit fusion and, therefore, inhibit viral infection by HCMV.

### SUMMARY OF THE INVENTION

[0007] HCMV gB protein structures in both its pre-fusion and post-fusion conformations have been solved as described in detail below, thereby providing information about the structure of the polypeptide, and druggable regions, domains and the like contained therein, all of which may be used in rational-based drug design efforts.

[0008] Accordingly, the present invention provides in part novel druggable regions in the HCMV gB protein. The interaction of a compound with such regions, or the modulation of the activity of such regions with a compound, could inhibit viral fusion and hence viral infectivity. In one aspect, the present invention provides methods of screening compounds against these druggable regions in order to discover a candidate therapeutic for HCMV infection caused by HCMV having gB protein such as, for example, a viral fusion inhibitor.

[0009] Furthermore, this invention provides a method for identifying a candidate therapeutic for treating or preventing a disease caused by HCMV infection comprising contacting a HCMV having a glycoprotein B (gB) polypeptide which comprises a druggable region with a compound, wherein binding of said compound indicates a candidate therapeutic. Compounds may in certain embodiments be selected from the following classes of compounds: proteins, peptides, polypeptides, peptidomimetics, antibodies, nucleic acids, and small molecules, or may be selected from a library of compounds. Such a library may be generated by combinatorial synthetic methods. Binding may be assayed either in vitro or in vivo. In certain embodiments of this method, the protein is HCMV gB protein and comprises at least one residue, preferably three residues, from a druggable region of HCMV gB protein. Such druggable regions also may be utilized in the structure determination, drug screening, drug design, and other methods described and claimed herein.

[0010] In one embodiment, the druggable region comprises residues K130-A135, D216-W233, R258-K260, A267-V273, R327-D329, W349-E350, V480-K518 and N676-Y690 of SEQ ID NO:1. These residues form the binding pocket for Domain V of HCMV gB protein in the postfusion conformation.

[0011] In yet another embodiment, a druggable region comprises a fusion loop or a portion thereof of HCMV gB protein in the postfusion conformation.

[0012] In another aspect, the present invention provides methods for identifying a candidate therapeutic for treating or preventing an infection caused by HCMV having gB protein. In certain embodiments, such methods comprise contacting the gB protein which comprises a druggable region with a compound, wherein the modulation of the activity of said gB protein indicates a candidate therapeutic. In other embodiments, such methods comprise contacting the gB protein which comprises a druggable region with a compound, wherein the preclusion of movement or interaction of said druggable region indicates a candidate therapeutic. In still other embodiments, the modulation of the function or activity of said gB protein involves precluding the completion of the post-fusion conformational change. In yet another embodiment, the modulation of the function or activity of said gB protein involves interfering with the first stage of the conformational change. In another embodiment, such method comprises contacting the gB protein which comprises a druggable region with a compound, wherein the inhibition of fusion of said virus indicates a candidate therapeutic. In yet another embodiment, the method comprises contacting the gB protein which comprises a druggable region with a compound, wherein the inhibition of viral infectivity of said HCMV indicates a candidate therapeutic. In still another embodiment, the reduction of at least one symptom of a disease caused by HCMV infection in a subject indicates a candidate therapeutic.

[0013] In a further embodiment, the invention provides a method for identifying a candidate therapeutic for disease caused by infection with HCMV having gB protein comprising contacting the gB protein which comprises a druggable region with a compound, wherein the compound prevents Domain V of the gB protein or a fragment thereof from binding in its binding pocket. In one embodiment, the binding pocket for Domain V of the gB protein comprises residues K130-A135, D216-W233, R258-K260, A267-V273, R327-D329, W349-E350, V480-K518 and N676-Y690 of SEQ ID NO:1.

[0014] In another aspect, all of the information learned and described herein about the gB protein may be used in methods of designing modulators of its biological activity. In one embodiment, a method for designing a modulator for the prevention or treatment of a disease caused by infection with HCMV having gB protein, comprises: (a) providing a three-dimensional structure for gB protein; (b) identifying a potential modulator for the prevention or treatment of disease caused by infection with HCMV having gB protein by reference to the three-dimensional structure; (c) contacting the gB protein with the potential modulator; and (d) assaying the activity of the gB protein or determining the viability of the virus having said gB protein after contact with the modulator, wherein a change in the activity of the protein or the viability of the virus indicates that the modulator may be useful for prevention or treatment of a virus-related disease or disorder. In certain embodiments, the potential modulator is identified by reference to the three-dimensional structure of HCMV having gB protein. In other embodiments, the potential modulator is identified by reference to the three-dimensional structure of a druggable region of the gB protein or a fragment thereof.

[0015] In a further aspect, the present invention provides modulators (in certain embodiments, inhibitors) of HCMV infection, as well as pharmaceutical compositions and kits comprising the same. Such modulators may in certain embodiments interact with a druggable region of the invention. In still another aspect, the present invention is directed toward a modulator that is a fragment (or homolog of such fragment or mimetic of such fragment) of Domain V of a HCMV gB protein and competes for that druggable region. Modulators of any of the above-described druggable regions may be used alone or in complementary approaches to treat or prevent infection by HCMV.

[0016] Finally, the present invention provides a druggable region of HCMV gB comprising residues K130-A135, D216-W233, R258-K260, A267-V273, R327-D329, W349-E350, V480-K518 and N676-Y690 of SEQ ID NO: 1. In one aspect, the residues of the druggable region are in a postfusion conformation.

[0017] The embodiments and practices of the present invention, other embodiments, and their features and characteristics, will be apparent from the description, figures and claims that follow, with all of the claims hereby being incorporated by this reference into this Summary.

### BRIEF DESCRIPTION OF THE DRAWINGS

[0018] FIG. 1A-1B describe two-dimensional (2D) class averages of gB conformers. FIG. 1A depicts the 2D projections from a postfusion gB structure. Projection images of an electron cryomicroscopy structure of postfusion gB bound with antibody Fabs are shown. FIG. 1B depicts 2D class averages. Two-dimensional class averages from electron cryomicroscopy images obtained from a preparation of gB extracted from CMV virions after treatment with a fusion inhibitor and a cross-linker and binding of an antibody fragment are shown on the right. Class averaged images that do not resemble any of the reference postfusion gB two dimensional projections are identified by circles.

[0019] FIG. 2 describes glycoprotein B amino acids included in the prefusion and postfusion gB-Fab complex models from our electron cryomicroscopy structures. The amino acids that can be modeled in the electron cryomicroscopy density maps are highlighted with the domain codes (Domain I (italics only, i.e., upper sequence (prefusion) residues 133-344; lower sequence (post-fusion) residues 133-344); Domain II (bold and underlined, i.e., upper sequence (prefusion) residues 121-132 and 345-436; lower sequence (post-fusion) residues 121-132 and 345-439); Domain III (bold only, i.e., upper sequence (prefusion) residues 86-120 and 483-550; lower sequence (post-fusion) residues 86-120 and 474-550); Domain IV (italics and underlined, i.e., upper sequence (prefusion) residues 551-641; lower sequence (post-fusion) residues 551-641); Domain V (italics and bold, i.e., upper sequence (prefusion) residues 642-724; lower sequence (post-fusion) residues 642-697); MPR (underline only, i.e., upper sequence (prefusion) residues 25-7507; lower sequence (post-fusion) no residues); TM (italics, bold, and underlined, i.e., upper sequence (prefusion) residues 751-769; lower sequence (post-fusion) no residues)). The upper and lower sequences are for the prefusion and postfusion structure models, respectively.

[0020] FIG. 3A-3B depict the fitting of models into the density maps. The models of inhibitor compound stabilized prefusion (FIG. 3A) and postfusion gB conformation (FIG. 3B) are fitted into the light gray density maps. gB components are dark gray, and SM5-1 fab components are black. Approximate position of the virus envelope as determined by the position of the TM region in the prefusion structure is indicated by black horizontal lines.

[0021] FIG. 4A-4B depict a comparison of the structures of gB in two conformations. The gB stabilized prefusion structure (FIG. 4A) and postfusion structure (FIG. 4B) are shown with one protomer to indicate the domains: I, II, III, IV, V, MPR and TM. The vertical black dashed line extending from the top of the prefusion structure represents residues missing from the model due to a less defined density map. The overall dimensions of the buildable ectodomain parts of the structure are indicated by the dashed line rectangles. The arrows indicate the direction pointed by the C-termini of the central 3-helix bundle in domain III of each conformation. The 115 Å dimension on the prefusion structure (FIG. 4A) indicates the height of the modeled part of the ectodomain.

[0022] FIG. 5A-5D: FIG. 5A depicts the location of fusion inhibitor compound N-{4-[({(1S)-1-[3,5-bis(trifluoromethyl)phenyl]ethyl}carbamothioyl)amino]phenyl}-1,3-thiazole-4-carboxamide in the prefusion gB model is shown in black. The chemical structure of the compound is shown in FIG. 5D. FIG. 5B: A close view of the electron density around the compound (grey transparent surface). Nearby amino acid residues are shown and domains are labeled. FIG. 5C: The interacting residues around the compound are shown.

[0023] FIG. 6A-6C depict a model of structural rearrangements of gB during membrane fusion. FL (and asterisks)—fusion loop. DI-domain 1. DII-domain 2. DV-domain 5. TM—transmembrane region. The solid lines depict membranes: host cell and viral membranes. FIG. 6A (prefusion) depicts a prefusion conformation; FIG. 6B (Extended intermediate) depicts an extended intermediate conformation; FIG. 6C (postfusion) depicts a postfusion conformation.

[0024] FIG. 7A-7B depict an exemplary disulfide bond mutation to stabilize gB in a prefusion conformation. The locations of the residues participating in the disulfide bond are depicted as gray spheres in a prefusion conformation (FIG. 7A) and postfusion conformation (FIG. 7B).

[0025] FIG. 8 depicts information from Research Collaboratory for Structural Bioinformatics Protein Data Bank (RCSB PDB) file: 5CXF, Crystal structure of the extracellular domain of glycoprotein B from Human Cytomegalovirus, from Human cytomegalovirus (strain AD169), deposited 2015-07-28; DOI: 10.2210/pdb5CXF/pdb.

### Unit Cell:

| Length (Å) | Angle (°) |
|---|---|
| a = 92.183 | α = 90.00 |
| b = 133.930 | β = 90.00 |
| c = 295.376 | γ = 90.00 |

[0027] FIG. 9 depicts sequences of gB from clinical and laboratory-adapted HCMV strains (SEQ ID NO: 110-SEQ ID NO: 111). Additional sequences may be found in an amino acid sequence alignment of gB from clinical and laboratory-adapted HCMV found in S4 Fig., from Burke et al., PLoS Pathog. 2015 Oct. 20; 11(10): e1005227. According to Burke et al. sixty HCMV gB sequences from clinical and laboratory-adapted strains, downloaded from NCBI's RefSeq data base, were aligned and analyzed using ClustalW2 and ESPript 3.x. Identical residues are shown as white text on red background, and similar residues are highlighted in yellow in S4 Fig. of Burke et al., said S4 Fig. and the description thereof is incorporated herein by reference in its entirety.

[0028] FIG. 10 depicts the amino acid sequences for SEQ ID NOs: 1-43 and SEQ ID NOS: 47-106.

[0029] FIG. 11 depicts the dose-dependent IgG responses in both gB1666 and wild type gB (Towne) immunized mice. The graph shows that 10 out of 10 mice immunized with wild type gB DNA, and 9 out of 10 mice immunized with gB1666 DNA generated detectable anti-gB IgG titers. Mean±SD, LLOQ=25.

[0030] FIG. 12 depicts the structural model of engineered gB1666 (light gray, structure code:P-GB-002) is overlaid with the structural model of wild type HCMV gB (dark gray, structure code:P-GB-001). The new structure allows modeling of additional residues, 437-448 and 478-482 at the membrane distal end of the molecule and 770-779 in the transmembrane domain.

[0031] FIG. 13 depicts an example of the combinations of additional mutation combinations on the pSB1666 background that could further stabilize prefusion gB. Disulfide bond at M371, W506 could link domains II and Ill. Disulfide bonds at N524, M684 and F541, E681 could link domains IV and V. Mutations of negatively charged patches at E686 to hydrophobic residues could further stabilize gB in prefusion conformation. Each domain is identified. Abbreviations: membrane proximal region (MPR), and transmembrane domain (TMD).

[0032] FIG. 14 depicts a SDS-PAGE documenting the expression and purification of recombinant gB2459 protein. The pSB2459 expression plasmid was transiently transfected into Expi293F cells. The cell pellets were harvested 68 hours after transfection, and the glycoprotein product gB2459 was purified in 25 mM HEPES pH 7.5, 250 mM NaCl, 0.02% n-Dodecyl β-D-maltoside (DDM), 0.002% cholesteryl hemi-succinate (CHS) through a series of processes of solubilization, affinity and size exclusion chromatography. This figure shows the purified protein analyzed by stain-free 4-20% SDS-PAGE under reducing conditions. The smearing of the protein band is consistent with gB2459 being heavily glycosylated. Lane M: protein marker; Lane 1: gB2457; and Lane 2: gB2459.

[0033] FIG. 15 depicts the construct pSB2459 which contains N524C and M684C mutations on the pSB1666 background. The protein product gB2459 was purified through affinity tags without the presence of any fusion inhibitors. There are prefusion classes observed in the 2D class averaged images (two classes with obvious prefusion features are indicated with the numbers 1 and 2). In addition, the prefusion gB2459 is stable over a period of a few days. Sample solution of gB2459 was stored at 4° C., aliquots of the sample were obtained at day 1 and day 7 to prepare the negative stained grids. An images dataset was collected and processed on these two grids. For each dataset, the particle populations in the prefusion and postfusion 2D classes were counted: the ratio between prefusion and postfusion conformation was 5:1 for the sample at day 1 and 3:1 at day 7.

[0034] FIG. 16A-16D depict the design of soluble, detergent-free gB ectodomains. FIG. 16A shows gB ectodomain (1-707) with MPR, TM and CT regions removed. FIG. 16B shows gB ectodomain stabilized with additional cysteine mutations, e.g. D703C and P704C, in Domain V.

[0035] FIG. 16C shows gB ectodomain fused to a C-terminal GCN4 trimerization motif. FIG. 16D shows gB ectodomain fused to a C-terminal T4 fibritin foldon domain. Legend: Domain I (residues 134-344)—dark gray 3D volume structure; Domain II (residues 121-133 and 345-436)—light gray 3D volume structure; Domain III (residues 97-111, 475-539 and 640-648)—top center light gray vertical coils; Domain V (residues 649-707)—bottom internal dark gray coils (see arrow FIG. 16B); and rectangle-trimerization location.

[0036] FIG. 17 depicts gel-filtration profiles of purified gB ectodomains, gB2264-gB2269, analyzed by Superose 6 Increase 10/300 in 20 mM HEPES PH 7.5, 250 mM NaCl.

[0037] FIG. 18A-18B depict a Negative stain EM image (FIG. 18A) and representative 2D class averages (FIG. 18B) from negative stain EM of recombinant gB2555 without bound fusion inhibitor, which show monodispersed gB proteins are suitable to use as a framework to add more stabilizing mutations towards a prefusion form of gB in the absence of inhibitor and detergents.

[0038] FIG. 19A-19B depict a Negative stain EM image (FIG. 19A) and representative 2D class averages (FIG. 19B) from negative stain EM of recombinant gB2556 without bound fusion inhibitor, which show monodispersed gB proteins are suitable to use as a framework to add more stabilizing mutations towards a prefusion form of gB in the absence of inhibitor and detergents.

[0039] FIG. 20A-20B depict the space-filled model of HCMV (Towne strain) domain V (residues 1642-V697 (SEQ ID NO: 281)) in prefusion (FIG. 20A) and postfusion (FIG. 20B) structures. Hydrophobic residues are labeled.

[0040] FIG. 21A-21C depict (FIG. 21A) HCMV gB (Towne Strain) domain V (light grey) and its binding pocket (dark grey) in postfusion conformation; (FIG. 21B) the space-filled model of the pocket without domain V is shown; and (FIG. 21C) ribbon representation of the same structure as in FIG. 21A with certain residues labeled.

### SEQUENCE IDENTIFIERS

[0041] SEQ ID NO: 1 sets forth an amino acid sequence derived from a native HCMV gB (strain Towne).

[0042] SEQ ID NO: 2 sets forth the amino acid sequence of SEQ ID NO: 1, wherein the following mutations are included: Q98C, G271C.

[0043] SEQ ID NO: 3 sets forth the amino acid sequence of SEQ ID NO: 1, wherein the following mutations are included: Q98C, 1653C.

[0044] SEQ ID NO: 4 sets forth the amino acid sequence of SEQ ID NO: 1, wherein the following mutations are included: G99C, A267C.

[0045] SEQ ID NO: 5 sets forth the amino acid sequence of SEQ ID NO: 1, wherein the following mutations are included: T100C, A267C.

[0046] SEQ ID NO: 6 sets forth the amino acid sequence of SEQ ID NO: 1, wherein the following mutations are included: T100C, S269C.

[0047] SEQ ID NO: 7 sets forth the amino acid sequence of SEQ ID NO: 1, wherein the following mutations are included: T100C, L651C.

[0048] SEQ ID NO: 8 sets forth the amino acid sequence of SEQ ID NO: 1, wherein the following mutations are included: D217C, F584C.

[0049] SEQ ID NO: 9 sets forth the amino acid sequence of SEQ ID NO: 1, wherein the following mutations are included: Y218C, A585C.

[0050] SEQ ID NO: 10 sets forth the amino acid sequence of SEQ ID NO: 1, wherein the following mutations are included: S219C, D654C.

[0051] SEQ ID NO: 11 sets forth the amino acid sequence of SEQ ID NO: 1, wherein the following mutations are included: N220C, D652C.

[0052] SEQ ID NO: 12 sets forth the amino acid sequence of SEQ ID NO: 1, wherein the following mutations are included: T221C, D652C.

[0053] SEQ ID NO: 13 sets forth the amino acid sequence of SEQ ID NO: 1, wherein the following mutations are included: W240C, G718C.

[0054] SEQ ID NO: 14 sets forth the amino acid sequence of SEQ ID NO: 1, wherein the following mutations are included: Y242C, K710C.

[0055] SEQ ID NO: 15 sets forth the amino acid sequence of SEQ ID NO: 1, wherein the following mutations are included: Y242C, D714C.

[0056] SEQ ID NO: 16 sets forth the amino acid sequence of SEQ ID NO: 1, wherein the following mutations are included: S269C, 1653C.

[0057] SEQ ID NO: 17 sets forth the amino acid sequence of SEQ ID NO: 1, wherein the following mutations are included: G271C, P614C.

[0058] SEQ ID NO: 18 sets forth the amino acid sequence of SEQ ID NO: 1, wherein the following mutations are included: S367C, L499C.

[0059] SEQ ID NO: 19 sets forth the amino acid sequence of SEQ ID NO: 1, wherein the following mutations are included: T372C, W506C.

[0060] SEQ ID NO: 20 sets forth the amino acid sequence of SEQ ID NO: 1, wherein the following mutations are included: F541C, Q669C.

[0061] SEQ ID NO: 21 sets forth the amino acid sequence of SEQ ID NO: 1, wherein the following mutations are included: L548C, A650C.

[0062] SEQ ID NO: 22 sets forth the amino acid sequence of SEQ ID NO: 1, wherein the following mutations are included: A549C, 1653C.

[0063] SEQ ID NO: 23 sets forth the amino acid sequence of SEQ ID NO: 1, wherein the following mutations are included: S550C, D652C.

[0064] SEQ ID NO: 24 sets forth the amino acid sequence of SEQ ID NO: 1, wherein the following mutations are included: G604C, F661C.

[0065] SEQ ID NO: 25 sets forth the amino acid sequence of SEQ ID NO: 1, wherein the following mutations are included: N605C, E665C.

[0066] SEQ ID NO: 26 sets forth the amino acid sequence of SEQ ID NO: 1, wherein the following mutations are included: R607C, S675C.

[0067] SEQ ID NO: 27 sets forth the amino acid sequence of SEQ ID NO: 1, wherein the following mutations are included: T608C, D679C.

[0068] SEQ ID NO: 28 sets forth the amino acid sequence of SEQ ID NO: 1, wherein the following mutations are included: E609C, F678C.

[0069] SEQ ID NO: 29 sets forth the amino acid sequence of SEQ ID NO: 1, wherein the following mutations are included: R673C, S674C.

[0070] SEQ ID NO: 30 sets forth the amino acid sequence of SEQ ID NO: 1, wherein the following mutations are included: N676C, V677C.

[0071] SEQ ID NO: 31 sets forth the amino acid sequence of SEQ ID NO: 1, wherein the following mutations are included: L680C, E681C.

[0072] SEQ ID NO: 32 sets forth the amino acid sequence of SEQ ID NO: 1, wherein the following mutations are included: 1683C, M684C.

[0073] SEQ ID NO: 33 sets forth the amino acid sequence of SEQ ID NO: 1, wherein the following mutations are included: F687C, N688C.

[0074] SEQ ID NO: 34 sets forth the amino acid sequence of SEQ ID NO: 1, wherein the following mutations are included: Y690C, K691C.

[0075] SEQ ID NO: 35 sets forth the amino acid sequence of SEQ ID NO: 1, wherein the following mutations are included: K695C, K724C.

[0076] SEQ ID NO: 36 sets forth the amino acid sequence of SEQ ID NO: 1, wherein the following mutations are included: T746C, F747C.

[0077] SEQ ID NO: 37 sets forth the amino acid sequence of SEQ ID NO: 1, wherein the following mutations are included: K749C, N750C.

[0078] SEQ ID NO: 38 sets forth the amino acid sequence of SEQ ID NO: 1, wherein the following mutation is included: K670 L.

[0079] SEQ ID NO: 39 sets forth the amino acid sequence of SEQ ID NO: 1, wherein the following mutation is included: K670F.

[0080] SEQ ID NO: 40 sets forth the amino acid sequence of SEQ ID NO: 1, wherein the following mutation is included: R673 L.

[0081] SEQ ID NO: 41 sets forth the amino acid sequence of SEQ ID NO: 1, wherein the following mutation is included: R673F.

[0082] SEQ ID NO: 42 sets forth the amino acid sequence of SEQ ID NO: 1, wherein the following mutation is included: K691 L.

[0083] SEQ ID NO: 43 sets forth the amino acid sequence of SEQ ID NO: 1, wherein the following mutation is included: K691F.

[0084] SEQ ID NO: 44 sets forth the amino acid sequence for a native HCMV gB (AD169; PDB: 5CXF) that folds into a postfusion conformation when expressed.

[0085] SEQ ID NO: 45 sets forth the amino acid sequence for an HCMV gB variant (gB705) that folds into a postfusion conformation when expressed.

[0086] SEQ ID NO: 46 sets forth the amino acid sequence for a native HCMV gB (Merlin strain) that folds into a postfusion conformation when expressed.

[0087] SEQ ID NO: 47 sets forth the amino acid of SEQ ID NO: 1, wherein the following mutations are included: M96C and D660C.

[0088] SEQ ID NO: 48 sets forth the amino acid of SEQ ID NO: 1, wherein the following mutations are included: Q98C and N658C.

[0089] SEQ ID NO: 49 sets forth the amino acid of SEQ ID NO: 1, wherein the following mutations are included: T100C and R258C.

[0090] SEQ ID NO: 50 sets forth the amino acid of SEQ ID NO: 1, wherein the following mutations are included: T100C and L656C.

[0091] SEQ ID NO: 51 sets forth the amino acid of SEQ ID NO: 1, wherein the following mutations are included: T100C and N658C.

[0092] SEQ ID NO: 52 sets forth the amino acid of SEQ ID NO: 1, wherein the following mutations are included: 1117C and T406C.

[0093] SEQ ID NO: 53 sets forth the amino acid of SEQ ID NO: 1, wherein the following mutations are included: 1117C and S407C.

[0094] SEQ ID NO: 54 sets forth the amino acid of SEQ ID NO: 1, wherein the following mutations are included: Y153C and L712C.

[0095] SEQ ID NO: 55 sets forth the amino acid of SEQ ID NO: 1, wherein the following mutations are included: L162C and M716C.

[0096] SEQ ID NO: 56 sets forth the amino acid of SEQ ID NO: 1, wherein the following mutations are included: D217C and S587C.

[0097] SEQ ID NO: 57 sets forth the amino acid of SEQ ID NO: 1, wherein the following mutations are included: D217C and Y589C.

[0098] SEQ ID NO: 58 sets forth the amino acid of SEQ ID NO: 1, wherein the following mutations are included: S219C and F584C.

[0099] SEQ ID NO: 59 sets forth the amino acid of SEQ ID NO: 1, wherein the following mutations are included: S219C and A585C.

[0100] SEQ ID NO: 60 sets forth the amino acid of SEQ ID NO: 1, wherein the following mutations are included: S219C and N586C.

[0101] SEQ ID NO: 61 sets forth the amino acid of SEQ ID NO: 1, wherein the following mutations are included: N220C and T659C.

[0102] SEQ ID NO: 62 sets forth the amino acid of SEQ ID NO: 1, wherein the following mutations are included: S223C and T659C.

[0103] SEQ ID NO: 63 sets forth the amino acid of SEQ ID NO: 1, wherein the following mutations are included: W240C and A732A.

[0104] SEQ ID NO: 64 sets forth the amino acid of SEQ ID NO: 1, wherein the following mutations are included: W240C and G735C.

[0105] SEQ ID NO: 65 sets forth the amino acid of SEQ ID NO: 1, wherein the following mutations are included: Y242C and V728C.

[0106] SEQ ID NO: 66 sets forth the amino acid of SEQ ID NO: 1, wherein the following mutations are included: Y242C and G731C.

[0107] SEQ ID NO: 67 sets forth the amino acid of SEQ ID NO: 1, wherein the following mutations are included: R258C and L656C.

[0108] SEQ ID NO: 68 sets forth the amino acid of SEQ ID NO: 1, wherein the following mutations are included: S269C and L656C.

[0109] SEQ ID NO: 69 sets forth the amino acid of SEQ ID NO: 1, wherein the following mutations are included: S269C and N658C.

[0110] SEQ ID NO: 70 sets forth the amino acid of SEQ ID NO: 1, wherein the following mutations are included: D272C and P614C.

[0111] SEQ ID NO: 71 sets forth the amino acid of SEQ ID NO: 1, wherein the following mutations are included: V273C and V629C.

[0112] SEQ ID NO: 72 sets forth the amino acid of SEQ ID NO: 1, wherein the following mutations are included: W349C and A650C.

[0113] SEQ ID NO: 73 sets forth the amino acid of SEQ ID NO: 1, wherein the following mutations are included: S367C and A500C.

[0114] SEQ ID NO: 74 sets forth the amino acid of SEQ ID NO: 1, wherein the following mutations are included: S367C and A503C.

[0115] SEQ ID NO: 75 sets forth the amino acid of SEQ ID NO: 1, wherein the following mutations are included: K370C and Q501C.

[0116] SEQ ID NO: 76 sets forth the amino acid of SEQ ID NO: 1, wherein the following mutations are included: K522C and 1683C.

[0117] SEQ ID NO: 77 sets forth the amino acid of SEQ ID NO: 1, wherein the following mutations are included: 1523C and 1683C.

[0118] SEQ ID NO: 78 sets forth the amino acid of SEQ ID NO: 1, wherein the following mutations are included: 1523C and M684C.

[0119] SEQ ID NO: 79 sets forth the amino acid of SEQ ID NO: 1, wherein the following mutations are included: N524C and M684C.

[0120] SEQ ID NO: 80 sets forth the amino acid of SEQ ID NO: 1, wherein the following mutations are included: P525C and E681C.

[0121] SEQ ID NO: 81 sets forth the amino acid of SEQ ID NO: 1, wherein the following mutations are included: R540C and L680C.

[0122] SEQ ID NO: 82 sets forth the amino acid of SEQ ID NO: 1, wherein the following mutations are included: F541C and L680C.

[0123] SEQ ID NO: 83 sets forth the amino acid of SEQ ID NO: 1, wherein the following mutations are included: L548C and P655C.

[0124] SEQ ID NO: 84 sets forth the amino acid of SEQ ID NO: 1, wherein the following mutations are included: A549C and N658C.

[0125] SEQ ID NO: 85 sets forth the amino acid of SEQ ID NO: 1, wherein the following mutations are included: S550C and P655C.

[0126] SEQ ID NO: 86 sets forth the amino acid of SEQ ID NO: 1, wherein the following mutations are included: S550C and E657C.

[0127] SEQ ID NO: 87 sets forth the amino acid of SEQ ID NO: 1, wherein the following mutations are included: Q591C and S668C.

[0128] SEQ ID NO: 88 sets forth the amino acid of SEQ ID NO: 1, wherein the following mutations are included: L603C and Y667C.

[0129] SEQ ID NO: 89 sets forth the amino acid of SEQ ID NO: 1, wherein the following mutations are included: G604C and L672C.

[0130] SEQ ID NO: 90 sets forth the amino acid of SEQ ID NO: 1, wherein the following mutations are included: R607C and N688C.

[0131] SEQ ID NO: 91 sets forth the amino acid of SEQ ID NO: 1, wherein the following mutations are included: T608C and Q692C.

[0132] SEQ ID NO: 92 sets forth the amino acid of SEQ ID NO: 1, wherein the following mutations are included: E609C and K691C.

[0133] SEQ ID NO: 93 sets forth the amino acid of SEQ ID NO: 1, wherein the following mutations are included: E610C and S674C.

[0134] SEQ ID NO: 94 sets forth the amino acid of SEQ ID NO: 1, wherein the following mutations are included: E610C and S675C.

[0135] SEQ ID NO: 95 sets forth the amino acid of SEQ ID NO: 1, wherein the following mutations are included: Q612C and V663C.

[0136] SEQ ID NO: 96 sets forth the amino acid of SEQ ID NO: 1, wherein the following mutations are included: V737C and F755C.

[0137] SEQ ID NO: 97 sets forth the amino acid of SEQ ID NO: 1, wherein the following mutations are included: V741C and A754C.

[0138] SEQ ID NO: 98 sets forth the amino acid of SEQ ID NO: 1, wherein the following mutations are included: V741C and F755C.

[0139] SEQ ID NO: 99 sets forth the amino acid of SEQ ID NO: 1, wherein the following mutation is included: D679S.

[0140] SEQ ID NO: 100 sets forth the amino acid of SEQ ID NO: 1, wherein the following mutation is included: D679N.

[0141] SEQ ID NO: 101 sets forth the amino acid of SEQ ID NO: 1, wherein the following mutation is included: E682S.

[0142] SEQ ID NO: 102 sets forth the amino acid of SEQ ID NO: 1, wherein the following mutation is included: E682Q.

[0143] SEQ ID NO: 103 sets forth the amino acid of SEQ ID NO: 1, wherein the following mutation is included: E686S.

[0144] SEQ ID NO: 104 sets forth the amino acid of SEQ ID NO: 1, wherein the following mutation is included: E686Q.

[0145] SEQ ID NO: 105 sets forth the amino acid of SEQ ID NO: 1, wherein the following mutation is included: N118P.

[0146] SEQ ID NO: 106 sets forth the amino acid of SEQ ID NO: 1, wherein the following mutation is included: D646P.

[0147] SEQ ID NO: 107 sets forth the amino acid sequence for >5CXF:A|PDBID|CHAIN|SEQUENCE, from FIG. 8.

[0148] SEQ ID NO: 108 sets forth the amino acid sequence for >5CXF:B|PDBID|CHAIN|SEQUENCE, from FIG. 8.

[0149] SEQ ID NO: 109 sets forth the amino acid sequence for >5CXF:C|PDBID|CHAIN|SEQUENCE, from FIG. 8.

[0150] SEQ ID NO: 110 sets forth the amino acid sequence for a gB polypeptide from HAN13 gi|242345614|gb|GQ221973.1|: 81988-84705 Human herpesvirus 5 strain HAN13, complete genome reverse complement, referenced in the description for FIG. 9.

[0151] SEQ ID NOS: 111 sets forth the amino acid sequence for a gB polypeptide from VR1814 gi| 270355759| gb|GU179289.1|: 81925-84642 Human herpesvirus 5 strain VR1814, complete genome reverse complement, referenced in the description for FIG. 9.

[0152] SEQ ID NOS: 112-140 sets forth the amino acid sequence for a gB polypeptide from various CMV gB strains described in FIG. 9.

[0153] SEQ ID NO: 141-SEQ ID NO: 210 set forth a polynucleotide sequence encoding a polypeptide derived from HCMV, such as for example, gH, gL, UL128, UL130, UL131, gB or pp 65.

[0154] SEQ ID NO: 211-SEQ ID NO: 223 set forth an amino acid sequence for a polypeptide derived from HCMV, such as for example, gH, gL, UL128, UL130, UL131, gB or pp 65.

[0155] SEQ ID NO: 224 sets forth an amino acid sequence for a polypeptide derived from HCMV.

[0156] SEQ ID NO: 225-SEQ ID NO: 254 set forth a polynucleotide sequence encoding a polypeptide derived from HCMV.

[0157] SEQ ID NO: 255-SEQ ID NO: 259 set forth the C-Term fusion sequences of various gB ectodomain proteins set forth in Table 9.

[0158] SEQ ID NO: 260-SEQ ID NO: 280 set forth the amino acid sequences of various fusion inhibitory peptides.

[0159] SEQ ID NO: 281 sets forth the amino acid sequence of Domain V of the gB polypeptide (Towne).

[0160] SEQ ID NO: 282-SEQ ID NO: 284 set forth the amino acid sequences of interacting regions of HCMV gB protein as shown in FIG. 20A-20B.

[0161] SEQ ID NO: 285-SEQ ID NO: 289 set forth the amino acid residues that form the binding pocket for Domain V of HCMV gB protein (in addition to R258-K260, R327-D329, and W349-E350 of SEQ ID NO: 1).

### DETAILED DESCRIPTION

[0162] As described herein, the inventors elucidated a three-dimensional structure of a HCMV glycoprotein B (gB) polypeptide in a conformation that differs from the postfusion conformation and which we refer to as a prefusion conformation. Mutations to stabilize the polypeptide in a prefusion conformation were also discovered. The structures may be used to generate HCMV neutralizing antibody responses greater than those achieved with prior HCMV gB-based immunogens. The polypeptides described herein, and the nucleic acids that encode the polypeptides, may be used, for example, as potential immunogens in a vaccine against HCMV and as diagnostic tools, among other uses.

[0163] The inventors further discovered mutations that can be introduced into a cytomegalovirus (CMV) gB polypeptide, which can, among other things, greatly facilitate the production and subsequent purification of a gB antigen stabilized in the prefusion conformation; significantly improve the efficiency of production of a gB polypeptide in the prefusion conformation; alter the antigenicity of a gB polypeptide, as compared to the wild-type gB polypeptide; facilitate a focused immune response to prefusion gB; and reduce and/or eliminate steric occlusion of neutralizing epitopes of gB.

[0164] Because fusion is a key step in viral infectivity, identification of druggable regions within the gB protein will further development of therapeutics that can specifically inhibit viral infection by HCMV.

### A. Native HCMV gB

[0165] Native HCMV gB is synthesized as a 906 or 907 amino acid polypeptide (depending upon the strain of CMV) that undergoes extensive posttranslational modification, including glycosylation at N- and O-linked sites and cleavage by ubiquitous cellular endoproteases into amino- and carboxy-terminal fragments. The N- and C-terminal fragments of gB, gp116 and gp55, respectively, are covalently connected by disulfide bonds, and the mature, glycosylated gB assumes a trimeric configuration. The gB polypeptide contains a large ectodomain (which is cleaved into gp116 and the ectodomain of gp55), a transmembrane domain(TM), and the intraviral (or cytoplasmic) domain (cytodomain).

[0166] Native HCMV gBs from various strains are known. For example, at least sixty HCMV gB sequences from clinical and laboratory-adapted strains are available from NCBI's RefSeq database. See also FIG. 9.

[0167] Accordingly, the term “CMV gB” polypeptide or “HCMV gB” polypeptide as used herein is to be understood as the native HCMV gB polypeptide from any human HCMV strain (not limited to the Towne strain). The actual residue position number may need to be adjusted for gBs from other human CMV strains depending on the actual sequence alignment.

[0168] HCMV gB is encoded by the UL55 gene of HCMV genome. It is an envelope glycoprotein that mediates the fusion of the HCMV viral membrane with a host cell membrane. The protein undergoes a series of conformational changes from a prefusion to a postfusion form. The crystal structure of gB in its postfusion form is available (PDB accession code 5CXF), and the prefusion conformation is described hereinbelow.

### B. Conformations

[0169] A HCMV gB postfusion conformation refers to a structural conformation adopted by HCMV gB subsequent to the fusion of the virus envelope with the host cellular membrane. The native HCMV gB may also assume the postfusion conformation outside the context of a fusion event, for example, under stress conditions such as exposure to heat, extraction from a membrane, expression as an ectodomain or storage. More specifically, the gB postfusion conformation is described, for example, in Burke et al., Crystal Structure of the Human Cytomegalovirus Glycoprotein B. PLoS Pathog. 2015 Oct. 20; 11(10): e1005227. See also, Research Collaboratory for Structural Bioinformatics Protein Data Bank (RCSB PDB): 5CXF, Crystal structure of the extracellular domain of glycoprotein B from Human Cytomegalovirus, from Human cytomegalovirus (strain AD169), deposited 2015-07-28; DOI: 10.2210/pdb5CXF/pdb; and FIG. 9. A sequence of a protein that when expressed, can fold into a postfusion conformation, is provided as SEQ ID NO: 44. Another example of a protein that when expressed folds into a postfusion conformation is provided as SEQ ID NO: 45. The postfusion conformation is about 165 Å tall and 65 Å wide.

[0170] As used herein, a “prefusion conformation” refers to a structural conformation adopted by the polypeptide that differs from the HCMV gB postfusion conformation at least in terms of molecular dimensions or three-dimensional coordinates. The prefusion conformation refers to a structural conformation adopted by HCMV gB prior to triggering of the fusogenic event that leads to transition of gB to the postfusion conformation. Isolating HCMV gB in a stable prefusion conformation may be useful in informing and directing development of improved vaccines and immunogenic compositions to address the important public health problem of cytomegalovirus infections. In some embodiments, a prefusion conformation includes a conformation that can bind to a prefusion-specific antibody. In some embodiments, a prefusion conformation includes a conformation that is characterized by coordinates set forth in Table 1A described in WO2021/260510 which is hereby incorporated by reference in its entirety. In some embodiments, the polypeptide is characterized by structure coordinates comprising a root mean square deviation (RMSD) of conserved residue backbone atoms when superimposed on backbone atoms described by structural coordinates of Table 1A described in WO2021/260510 which is hereby incorporated by reference in its entirety. In some embodiments, a prefusion conformation includes a conformation that is characterized by coordinates set forth in Table 1B described in WO2021/260510 which is hereby incorporated by reference in its entirety. In some embodiments, the polypeptide is characterized by structure coordinates comprising a root mean square deviation (RMSD) of conserved residue backbone atoms when superimposed on backbone atoms described by structural coordinates of Table 1B described in WO2021/260510 which is hereby incorporated by reference in its entirety. In some embodiments, a polypeptide having a HCMV gB prefusion conformation refers to a polypeptide that includes a trimeric helix bundle, centered on the three-fold axis of the trimer and comprising residues L479 to K522 of each protomer, wherein the direction of the bundle from N-terminal to C-terminal along the three-fold axis (shown by the arrows in FIG. 4A & FIG. 4B) is towards the point on the three-fold axis intersected by the plane defined by residue W240 of each protomer, which is in a fusion loop near the tip of each Domain I of the trimer. In some embodiments, the helix bundle comprises the residues between L479 and K522, according to the numbering of SEQ ID NO: 1.

### C. Mutants of Wild-Type HCMV gB

[0171] The present invention includes polypeptides that comprise amino acid mutations relative to the amino acid sequence of the corresponding wild-type HCMV gB. The amino acid mutations include amino acid substitutions, deletions, or additions relative to a wild-type HCMV gB. Accordingly, the polypeptides are mutants of wild-type HCMV gBs.

[0172] In some embodiments, the polypeptides possess certain beneficial characteristics, such as being immunogenic. In some embodiments, the polypeptides possess increased immunogenic properties or improved stability in the prefusion conformation, as compared to the corresponding wild-type HCMV gB. Stability refers to the degree to which a transition of the HCMV gB conformation from prefusion to postfusion is hindered or prevented. In still other embodiments, the present disclosure provides polypeptides that display one or more introduced mutations as described herein, which may also result in improved stability in the prefusion conformation. The introduced amino acid mutations in the HCMV gB include amino acid substitutions, deletions, or additions. In some embodiments, the only mutations in the amino acid sequences of the mutants are amino acid substitutions relative to a wild-type HCMV gB.

[0173] Several modes of stabilizing the polypeptide conformation include amino acid substitutions that introduce disulfide bonds, introduce electrostatic mutations, fill cavities, alter the packing of residues, introduce N-linked glycosylation sites, and combinations thereof, as compared to a native HCMV gB.

[0174] In one aspect, the invention relates to a polypeptide that exhibits a conformation that is not the postfusion conformation. That is, the polypeptide exhibits a prefusion conformation as described above and does not exhibit a postfusion conformation. See, for example, the prefusion conformation illustrated in FIG. 3A, as compared to the postfusion conformation illustrated in FIG. 3B; FIG. 4A, as compared to the postfusion conformation illustrated in FIG. 4B; and FIG. 6A, as compared to the postfusion conformation illustrated in FIG. 6C. In some embodiments, the polypeptide is characterized by structure coordinates comprising a root mean square deviation (RMSD) of conserved residue backbone atoms when superimposed on backbone atoms described by structural coordinates of Table 1A described in WO2021/260510 which is hereby incorporated by reference in its entirety. In some embodiments, the polypeptide is characterized by structure coordinates comprising a root mean square deviation (RMSD) of conserved residue backbone atoms when superimposed on backbone atoms described by structural coordinates of Table 1B described in WO2021/260510 which is hereby incorporated by reference in its entirety.

[0175] In some embodiments, the polypeptides are isolated, i.e., separated from HCMV gB polypeptides having a postfusion conformation. Thus, the polypeptide may be, for example, at least 80% isolated, at least 90%, 95%, 98%, 99%, or even 99.9% isolated from HCMV gB polypeptides in a postfusion conformation. In one aspect, the invention relates to a polypeptide that specifically binds to an HCMV gB prefusion-specific antibody.

[0176] It will be understood that a homogeneous population of polypeptides in a particular conformation can include variations (such as polypeptide modification variations, e.g., glycosylation state), that do not alter the conformational state of the polypeptide. In several embodiments, the population of polypeptides remains homogeneous over time. For example, in some embodiments, the polypeptide, when dissolved in aqueous solution, forms a population of polypeptides stabilized in the prefusion conformation for at least 12 hours, such as at least 24 hours, at least 48 hours, at least one week, at least two weeks, or more.

[0177] Without being bound by theory, the polypeptides disclosed herein are believed to facilitate a stabilized prefusion conformation of an HCMV gB polypeptide. The polypeptides include at least one mutation as compared to a corresponding native HCMV gB polypeptide. A person of ordinary skill in the art will appreciate that the polypeptides are useful to elicit immune responses in mammals to CMV.

[0178] The native HCMV gB is conserved among the HCMV entry glycoproteins and is required for entry into all cell types. In view of the substantial conservation of HCMV gB sequences, the amino acid positions amongst different native HCMV gB sequences may be compared to identify corresponding HCMV gB amino acid positions among different HCMV strains. Thus, the conservation of native HCMV gB sequences across strains allows use of a reference HCMV gB sequence for comparison of amino acids at particular positions in the HCMV gB polypeptide. Accordingly, unless expressly indicated otherwise, the polypeptide amino acid positions provided herein refer to the reference sequence of the HCMV gB polypeptide set forth in SEQ ID NO: 1.

[0179] However, it should be noted that different native HCMV gB sequences may have different numbering systems from SEQ ID NO: 1, for example, there may be additional amino acid residues added or removed as compared to SEQ ID NO: 1 in a native HCMV gB sequence derived from a strain other than Towne. As such, it is to be understood that when specific amino acid residues are referred to by their number, the description is not limited to only amino acids located at precisely that numbered position when counting from the beginning of a given amino acid sequence, but rather that the equivalent or corresponding amino acid residue in any and all HCMV gB sequences is intended even if that residue is not at the same precise numbered position, for example if the HCMV sequence is shorter (e.g., a fragment) or longer than SEQ ID NO: 1, or has insertions or deletions as compared to SEQ ID NO: 1.

[0180] In some embodiments, the polypeptide is full-length, wherein the polypeptide includes the same number of amino acid residues as the mature full-length wild-type HCMV gB. In some embodiments, the polypeptide is a fragment, wherein the polypeptide includes less than the total number of amino acid residues as the mature full-length wild-type HCMV gB. In some embodiments, the truncated gB polypeptide includes only the ectodomain sequence.

### C.1. Cysteine (C) Substitutions

[0181] In some embodiments, the polypeptide includes cysteine substitutions that are introduced, as compared to a native HCMV gB. In some embodiments, the polypeptide includes any one of 1, 2, 3, 4, 5, 6, 7, 8, 9, or 10 cysteine substitutions. Without being bound by theory or mechanism, the cysteine substitutions described herein are believed to facilitate stability of the polypeptide in a conformation that is not the HCMV gB postfusion conformation. The introduced cysteine substitutions may be introduced by protein engineering, for example, by including one or more substituted cysteine residues that form a disulfide bond. In several embodiments, the amino acid positions of the cysteines are within a sufficiently close distance for formation of a disulfide bond in the prefusion, and not postfusion, conformation of the HCMV gB.

[0182] The cysteine residues that form a disulfide bond can be introduced into native HCMV gB sequence by two or more amino acid substitutions. For example, in some embodiments, two cysteine residues are introduced into a native HCMV gB sequence to form a disulfide bond.

[0183] In some embodiments, the polypeptide includes a recombinant HCMV gB stabilized in a prefusion conformation by a disulfide bond between cysteines that are introduced into a pair of amino acid positions that are close to each other in the prefusion conformation and more distant in the postfusion conformation.

[0184] Exemplary cysteine substitutions as compared to a native HCMV gB include any mutation selected from Table 2, the numbering of which based on the numbering of SEQ ID NO: 1.

TABLE 2
Exemplary cysteine pairs for disulfide bond stabilization

| | | (ii) HCMV | | |
|---|---|---|---|---|
| | | gB residue | | |
| | | pairs for | | (iv) |
| | | cysteine | | Exemplary |
| | | substitution, | (i ) | sequence |
| | | according to | Substitutions | that |
| | (i) | the numbering | corresponding | includes the |
| | Mutant | of SEQ | to SEQ ID | mutations is |
| Row | ID | ID NO: 1 | NO: 1 | set forth in: |
| 1 | gB-001; | 98 and 271 | Q98C and G271C | SEQ ID NO: 2 |
| | pSB01582 | | | |
| 2 | gB-002 | 98 and 653 | Q98C and I653C | SEQ ID NO: 3 |
| 3 | gB-003; | 99 and 267 | G99C and A267C | SEQ ID NO: 4 |
| | pSB01579 | | | |
| 4 | gB-004; | 100 and 267 | T100C and A267C | SEQ ID NO: 5 |
| | pSB01580 | | | |
| 5 | gB-005; | 100 and 269 | T100C and S269C | SEQ ID NO: 6 |
| | pSB01581 | | | |
| 6 | gB-006 | 100 and 651 | T100C and L651C | SEQ ID NO: 7 |
| 7 | gB-007 | 217 and 584 | D217C and F584C | SEQ ID NO: 8 |
| 8 | gB-008 | 218 and 585 | Y218C and A585C | SEQ ID NO: 9 |
| 9 | gB-009 | 219 and 654 | S219C and D654C | SEQ ID NO: 10 |
| 10 | gB-010 | 220 and 652 | N220C and D652C | SEQ ID NO: 11 |
| 11 | gB-011 | 221 and 652 | T221C and D652C | SEQ ID NO: 12 |
| 12 | gB-012 | 240 and 718 | W240C and G718C | SEQ ID NO: 13 |
| 13 | gB-013 | 242 and 710 | Y242C and K710C | SEQ ID NO: 14 |
| 14 | gB-014 | 242 and 714 | Y242C and D714C | SEQ ID NO: 15 |
| 15 | gB-015 | 269 and 653 | S269C and I653C | SEQ ID NO: 16 |
| 16 | gB-016 | 271 and 614 | G271C and P614C | SEQ ID NO: 17 |
| 17 | gB-017 | 367 and 499 | S367C and L499C | SEQ ID NO: 18 |
| 18 | gB-018 | 372 and 506 | T372C and W506C | SEQ ID NO: 19 |
| 19 | gB-019 | 541 and 669 | F541C and Q669C | SEQ ID NO: 20 |
| 20 | gB-020 | 548 and 650 | L548C and A650C | SEQ ID NO: 21 |
| 21 | gB-021 | 549 and 653 | A549C and I6530 | SEQ ID NO: 22 |
| 22 | gB-022 | 550 and 652 | S550C and D652C | SEQ ID NO: 23 |
| 23 | gB-023 | 604 and 661 | G604C and F661C | SEQ ID NO: 24 |
| 24 | gB-024 | 605 and 665 | N605C and E665C | SEQ ID NO: 25 |
| 25 | gB-025 | 607 and 675 | R607C and S675C | SEQ ID NO: 26 |
| 26 | gB-026 | 608 and 679 | T608C and D679C | SEQ ID NO: 27 |
| 27 | gB-027 | 609 and 678 | E609C and F678C | SEQ ID NO: 28 |
| 28 | gB-028 | 673 and 674 | R673C and S674C | SEQ ID NO: 29 |
| 29 | gB-029 | 676 and 677 | N676C and V677C | SEQ ID NO: 30 |
| 30 | gB-030 | 680 and 681 | L680C and E681C | SEQ ID NO: 31 |
| 31 | gB-031 | 683 and 684 | I683C and M684C | SEQ ID NO: 32 |
| 32 | gB-032 | 687 and 688 | F687C and N688C | SEQ ID NO: 33 |
| 33 | gB-033 | 690 and 691 | Y690C and K691C | SEQ ID NO: 34 |
| 34 | gB-034 | 695 and 724 | K695C and K724C | SEQ ID NO: 35 |
| 35 | gB-035 | 746 and 747 | T746C and F747C | SEQ ID NO: 36 |
| 36 | gB-036 | 749 and 750 | K749C and N750C | SEQ ID NO: 37 |
| 37 | gB-043; | 96 and 660 | M96C and | SEQ ID NO: 47 |
| | pSB01656 | | D660C | |
| 38 | gB-044; | 98 and 658 | Q98C and N658C | SEQ ID NO: 48 |
| | pSB01657 | | | |
| 39 | gB-045; | 100 and 258 | T100C and | SEQ ID NO: 49 |
| | pSB01658 | | R258C | |
| 40 | gB-046; | 100 and 656 | T100C and L656C | SEQ ID NO: 50 |
| | pSB01659 | | | |
| 41 | gB-047; | 100 and 658 | T100C and | SEQ ID NO: 51 |
| | pSB01660 | | N658C | |
| 42 | gB-048; | 117 and 406 | I117C and T406C | SEQ ID NO: 52 |
| | pSB01661 | | | |
| 43 | gB-049; | 117 and 407 | I117C and S407C | SEQ ID NO: 53 |
| | pSB01662 | | | |
| 44 | gB-050; | 153 and 712 | Y153C and L712C | SEQ ID NO: 54 |
| | pSB01663 | | | |
| 45 | gB-051; | 162 and 716 | L162C and | SEQ ID NO: 55 |
| | pSB01664 | | M716C | |
| 46 | gB-052; | 217 and 587 | D217C and | SEQ ID NO: 56 |
| | pSB01665 | | S587C | |
| 47 | gB-053; | 217 and 589 | D217C and | SEQ ID NO: 57 |
| | pSB01666 | | Y589C | |
| 48 | gB-054; | 219 and 584 | S219C and | SEQ ID NO: 58 |
| | pSB01667 | | F584C | |
| 49 | gB-055; | 219 and 585 | S219C and | SEQ ID NO: 59 |
| | pSB01668 | | A585C | |
| 50 | gB-056; | 219 and 586 | S219C and | SEQ ID NO: 60 |
| | pSB01669 | | N586C | |
| 51 | gB-057; | 220 and 659 | N220C and | SEQ ID NO: 61 |
| | pSB01670 | | T659C | |
| 52 | gB-058; | 223 and 659 | S223C and | SEQ ID NO: 62 |
| | pSB01671 | | T659C | |
| 53 | gB-059; | 240 and 732 | W240C and | SEQ ID NO: 63 |
| | pSB01672 | | A732C | |
| 54 | gB-060; | 240 and 735 | W240C and | SEQ ID NO: 64 |
| | pSB01673 | | G735C | |
| 55 | gB-061; | 242 and 728 | Y242C and | SEQ ID NO: 65 |
| | pSB01674 | | V728C | |
| 56 | gB-062; | 242 and 731 | Y242C and | SEQ ID NO: 66 |
| | pSB01675 | | G731C | |
| 57 | gB-063 | 258 and 656 | R258C and | SEQ ID NO: 67 |
| | | | L656C | |
| 58 | gB-064 | 269 and 656 | S269C and L656C | SEQ ID NO: 68 |
| 59 | gB-065 | 269 and 658 | S269C and | SEQ ID NO: 69 |
| | | | N658C | |
| 60 | gB-066; | 272 and 614 | D272C and | SEQ ID NO: 70 |
| | pSB01679 | | P614C | |
| 61 | gB-067; | 273 and 629 | V273C and | SEQ ID NO: 71 |
| | pSB01680 | | V629C | |
| 62 | gB-068 | 349 and 650 | W349C and | SEQ ID NO: 72 |
| | | | A650C | |
| 63 | gB-069; | 367 and 500 | S367C and | SEQ ID NO: 73 |
| | pSB01682 | | A500C | |
| 64 | gB-070; | 367 and 503 | S367C and | SEQ ID NO: 74 |
| | pSB01683 | | A503C | |
| 65 | gB-071; | 370 and 501 | K370C and | SEQ ID NO: 75 |
| | pSB01684 | | Q501C | |
| 66 | gB-072; | 522 and 683 | K522C and I683C | SEQ ID NO: 76 |
| | pSB01685 | | | |
| 67 | gB-073; | 523 and 683 | I523C and I683C | SEQ ID NO: 77 |
| | pSB01686 | | | |
| 68 | gB-074; | 523 and 684 | I523C and | SEQ ID NO: 78 |
| | pSB01687 | | M684C | |
| 69 | gB-075 | 524 and 684 | N524C and | SEQ ID NO: 79 |
| | | | M684C | |
| 70 | gB-076 | 525 and 681 | P525C and | SEQ ID NO: 80 |
| | | | E681C | |
| 71 | gB-077 | 540 and 680 | R540C and | SEQ ID NO: 81 |
| | | | L680C | |
| 72 | gB-078 | 541 and 680 | F541C and L680C | SEQ ID NO: 82 |
| 73 | gB-079 | 548 and 655 | L548C and | SEQ ID NO: 83 |
| | | | P655C | |
| 74 | gB-080 | 549 and 658 | A549C and | SEQ ID NO: 84 |
| | | | N658C | |
| 75 | gB-081 | 550 and 655 | S550C and | SEQ ID NO: 85 |
| | | | P655C | |
| 76 | gB-082 | 550 and 657 | S550C and | SEQ ID NO: 86 |
| | | | E657C | |
| 77 | gB-083 | 591 and 668 | Q591C and | SEQ ID NO: 87 |
| | | | S668C | |
| 78 | gB-084; | 603 and 667 | L603C and | SEQ ID NO: 88 |
| | pSB01697 | | Y667C | |
| 79 | gB-085; | 604 and 672 | G604C and | SEQ ID NO: 89 |
| | pSB01698 | | L672C | |
| 80 | gB-086; | 607 and 688 | R607C and | SEQ ID NO: 90 |
| | pSB01699 | | N688C | |
| 81 | gB-087; | 608 and 692 | T608C and | SEQ ID NO: 91 |
| | pSB01700 | | Q692C | |
| 82 | gB-088; | 609 and 691 | E609C and | SEQ ID NO: 92 |
| | pSB01701 | | K691C | |
| 83 | gB-089; | 610 and 674 | E610C and | SEQ ID NO: 93 |
| | pSB01702 | | S674C | |
| 84 | gB-090; | 610 and 675 | E610C and | SEQ ID NO: 94 |
| | pSB01703 | | S675C | |
| 85 | gB-091; | 612 and 663 | Q612C and | SEQ ID NO: 95 |
| | pSB01704 | | V663C | |
| 86 | gB-092; | 737 and 755 | V737C and | SEQ ID NO: 96 |
| | pSB01705 | | F755C | |
| 87 | gB-093; | 741 and 754 | V741C and | SEQ ID NO: 97 |
| | pSB01706 | | A754C | |
| 88 | gB-094; | 741 and 755 | V741C and | SEQ ID NO: 98 |
| | pSB01707 | | F755C | |
| 89 | | 217 and 589 | D217C and | |
| | | | Y589C | |
| 90 | | 356 and 500 | I356C and | |
| | | | A500C | |
| 91 | | 367 and 500 | S367C and | |
| | | | A500C | |
| 92 | | 367 and 503 | S367C and | |
| | | | A503C | |
| 93 | | 371 and 505 | M371C and | |
| | | | A505C | |
| 94 | | 371 and W506 | M371C and | |
| | | | W506C | |
| 95 | | 374 and 503 | T374C and | |
| | | | A503C | |
| 96 | | 160 and 708 | Y160C and | |
| | | | Y708C | |
| 97 | | 162 and 716 | L162C and | |
| | | | M716C | |
| 98 | | 524 and 684 | N524C and | |
| | | | M684C | |
| 99 | | 99 and 267 | G99C and | |
| | | | A267C | |
| 100 | | 100 and 258 | T100C and | |
| | | | R258C | |
| 101 | | 221 and 657 | T221C and | |
| | | | E657C | |
| 102 | | 223 and 659 | S223C and | |
| | | | T659C | |
| 103 | | 541 and 681 | F541C and | |
| | | | E681C | |
| 104 | | 603 and 667 | L603C and | |
| | | | Y667C | |
| 105 | | 605 and 670 | N605C and | |
| | | | K670C | |
| 106 | | 607 and 688 | R607C and | |
| | | | N688C | |
| 107 | | 609 and 691 | E609C and | |
| | | | K691C | |

[0185] In some embodiments, the polypeptide includes one or more (such as 2, 3, 4, 5, 6, 7, 8, 9 or 10) cysteine substitutions at any one of the positions listed in one or more of rows 1, 2, 3, 4, 5, 6, 7, 8, 9, 10, 11, 12, 13, 14, 15, 16, 17, 18, 19, 20, 21, 22, 23, 24, 25, 26, 27, 28, 29, 30, 31, 32, 33, 34, 35, or 36 of column (ii) of Table 2, wherein the resulting polypeptide does not exhibit an HCMV postfusion conformation.

[0186] In some embodiments, the polypeptide includes one or more (such as 2, 3, 4, 5, 6, 7, 8, 9 or 10) cysteine substitutions at any one of the positions listed in one or more of rows 1, 2, 3, 4, 5, 6, 7, 8, 9, 10, 11, 12, 13, 14, 15, 16, 17, 18, 19, 20, 21, 22, 23, 24, 25, 26, 27, 28, 29, 30, 31, 32, 33, 34, 35, 36, 37, 38, 39, 40, 41, 42, 43, 44, 45, 46, 47, 48, 49, 50, 51, 52, 53, 54, 55, 56, 57, 58, 59, 60, 61, 62, 63, 64, 65, 66, 67, 68, 69, 70, 71, 72, 73, 74, 75, 76, 77, 78, 79, 80, 81, 82, 83, 84, 85, 86, 87, or 88 of column (ii) of, wherein the resulting polypeptide does not exhibit an HCMV postfusion conformation.

[0187] In a preferred embodiment, the polypeptide includes cysteine substitutions at positions 98 and 653 (listed in row 2, column (ii) of Table 2) according to the numbering of SEQ ID NO: 1, relative to the amino acid sequence of the wild-type HCMV gB. In another preferred embodiment, the polypeptide includes cysteine substitutions at positions 100 and 269 (listed in row 5, column (ii) of Table 2) according to the numbering of SEQ ID NO: 1, relative to the amino acid sequence of the wild-type HCMV gB. In a further preferred embodiment, the polypeptide includes cysteine substitutions at positions 217 and 584 (listed in row 7, column (ii) of Table 2) according to the numbering of SEQ ID NO: 1, relative to the amino acid sequence of the wild-type HCMV gB. In a preferred embodiment, the polypeptide includes cysteine substitutions at positions 242 and 710 (listed in row 13, column (ii) of Table 2) according to the numbering of SEQ ID NO: 1, relative to the amino acid sequence of the wild-type HCMV gB. In another preferred embodiment, the polypeptide includes cysteine substitutions at positions 242 and 714 (listed in row 14, column (ii) of Table 2) according to the numbering of SEQ ID NO: 1, relative to the amino acid sequence of the wild-type HCMV gB. In a further preferred embodiment, the polypeptide includes cysteine substitutions at positions 367 and 499 (listed in row 17, column (ii) of Table 2) according to the numbering of SEQ ID NO: 1, relative to the amino acid sequence of the wild-type HCMV gB. In a preferred embodiment, the polypeptide includes cysteine substitutions at positions 372 and 506 (listed in row 18, column (ii) of Table 2) according to the numbering of SEQ ID NO: 1, relative to the amino acid sequence of the wild-type HCMV gB. In another preferred embodiment, the polypeptide includes cysteine substitutions at positions 550 and 652 (listed in row 22, column (ii) of Table 2) according to the numbering of SEQ ID NO: 1, relative to the amino acid sequence of the wild-type HCMV gB. In a further preferred embodiment, the polypeptide includes cysteine substitutions at positions 608 and 679 (listed in row 26, column (ii) of Table 2) according to the numbering of SEQ ID NO: 1, relative to the amino acid sequence of the wild-type HCMV gB. In a preferred embodiment, the polypeptide includes cysteine substitutions at positions 695 and 724 (listed in row 34, column (ii) of Table 2) according to the numbering of SEQ ID NO: 1, relative to the amino acid sequence of the wild-type HCMV gB.

[0188] In some embodiments, the polypeptide includes one or more (such as 2, 3, 4, 5, 6, 7, 8, 9 or 10) disulfide bonds between pairs of cysteine residues substituted at any one of the pairs of positions listed in one or more of rows 1, 2, 3, 4, 5, 6, 7, 8, 9, 10, 11, 12, 13, 14, 15, 16, 17, 18, 19, 20, 21, 22, 23, 24, 25, 26, 27, 28, 29, 30, 31, 32, 33, 34, 35, 36, 37, 38, 39, 40, 41, 42, 43, 44, 45, 46, 47, 48, 49, 50, 51, 52, 53, 54, 55, 56, 57, 58, 59, 60, 61, 62, 63, 64, 65, 66, 67, 68, 69, 70, 71, 72, 73, 74, 75, 76, 77, 78, 79, 80, 81, 82, 83, 84, 85, 86, 87, and 88 of column (ii) of Table 2.

[0189] In a preferred embodiment, the polypeptide includes a disulfide bond between a pair of cysteine residues substituted at positions 98 and 653 (listed in row 2, column (ii) of Table 2) according to the numbering of SEQ ID NO: 1, relative to the amino acid sequence of the wild-type HCMV gB. In another preferred embodiment, the polypeptide includes a disulfide bond between a pair of cysteine residues substituted at positions 100 and 269 (listed in row 5, column (ii) of Table 2) according to the numbering of SEQ ID NO: 1, relative to the amino acid sequence of the wild-type HCMV gB. In a further preferred embodiment, the polypeptide includes a disulfide bond between a pair of cysteine residues substituted at positions 217 and 584 (listed in row 7, column (ii) of Table 2) according to the numbering of SEQ ID NO: 1, relative to the amino acid sequence of the wild-type HCMV gB. In a preferred embodiment, the polypeptide includes a disulfide bond between a pair of cysteine residues substituted at positions 242 and 710 (listed in row 13, column (ii) of Table 2) according to the numbering of SEQ ID NO: 1, relative to the amino acid sequence of the wild-type HCMV gB. In another preferred embodiment, the polypeptide includes a disulfide bond between a pair of cysteine residues substituted at positions 242 and 714 (listed in row 14, column (ii) of Table 2) according to the numbering of SEQ ID NO: 1, relative to the amino acid sequence of the wild-type HCMV gB. In a further preferred embodiment, the polypeptide includes a disulfide bond between a pair of cysteine residues substituted at positions 367 and 499 (listed in row 17, column (ii) of Table 2) according to the numbering of SEQ ID NO: 1, relative to the amino acid sequence of the wild-type HCMV gB. In a preferred embodiment, the polypeptide includes a disulfide bond between a pair of cysteine residues substituted at positions 372 and 506 (listed in row 18, column (ii) of Table 2) according to the numbering of SEQ ID NO: 1, relative to the amino acid sequence of the wild-type HCMV gB. In another preferred embodiment, the polypeptide includes a disulfide bond between a pair of cysteine residues substituted at positions 550 and 652 (listed in row 22, column (ii) of Table 2) according to the numbering of SEQ ID NO: 1, relative to the amino acid sequence of the wild-type HCMV gB. In a further preferred embodiment, the polypeptide includes a disulfide bond between a pair of cysteine residues substituted at positions 608 and 679 (listed in row 26, column (ii) of Table 2) according to the numbering of SEQ ID NO: 1, relative to the amino acid sequence of the wild-type HCMV gB. In a preferred embodiment, the polypeptide includes a disulfide bond between a pair of cysteine residues substituted at positions 695 and 724 (listed in row 34, column (ii) of Table 2 according to the numbering of SEQ ID NO: 1, relative to the amino acid sequence of the wild-type HCMV gB.

[0190] In further embodiments, the polypeptide includes one or more (such as 2, 3, 4, 5, 6, 7, 8, 9 or 10) disulfide bonds between pairs of cysteine residues that are introduced by cysteine amino acid substitutions at any one of the pairs of positions listed in one or more of rows 1, 2, 3, 4, 5, 6, 7, 8, 9, 10, 11, 12, 13, 14, 15, 16, 17, 18, 19, 20, 21, 22, 23, 24, 25, 26, 27, 28, 29, 30, 31, 32, 33, 34, 35, or 36 of column (iii) of Table 2, wherein the polypeptide does not exhibit an HCMV postfusion conformation.

[0191] In further embodiments, the polypeptide includes one or more (such as 2, 3, 4, 5, 6, 7, 8, 9 or 10) disulfide bonds between pairs of cysteine residues that are introduced by cysteine amino acid substitutions at any one of the pairs of positions listed in one or more of rows 1, 2, 3, 4, 5, 6, 7, 8, 9, 10, 11, 12, 13, 14, 15, 16, 17, 18, 19, 20, 21, 22, 23, 24, 25, 26, 27, 28, 29, 30, 31, 32, 33, 34, 35, 36, 37, 38, 39, 40, 41, 42, 43, 44, 45, 46, 47, 48, 49, 50, 51, 52, 53, 54, 55, 56, 57, 58, 59, 60, 61, 62, 63, 64, 65, 66, 67, 68, 69 70, 71 72, 73, 74, 75, 76, 77, 78, 79, 80, 81, 82, 83, 84, 85, 86, 87, or 88 of column (iii) of Table 2, wherein the polypeptide does not exhibit an HCMV postfusion conformation.

[0192] In a preferred embodiment, the polypeptide includes cysteine substitutions at Q98C and 1653C (listed in row 2, column (iii) of Table 2) according to the numbering of SEQ ID NO: 1, relative to the amino acid sequence of the wild-type HCMV gB. In another preferred embodiment, the polypeptide includes cysteine substitutions at T100C and S269C (listed in row 5, column (iii) of Table 2) according to the numbering of SEQ ID NO: 1, relative to the amino acid sequence of the wild-type HCMV gB. In a further preferred embodiment, the polypeptide includes cysteine substitutions at D217C and F584C (listed in row 7, column (iii) of Table 2) according to the numbering of SEQ ID NO: 1, relative to the amino acid sequence of the wild-type HCMV gB. In a preferred embodiment, the polypeptide includes cysteine substitutions at Y242C and K710C (listed in row 13, column (iii) of Table 2) according to the numbering of SEQ ID NO: 1, relative to the amino acid sequence of the wild-type HCMV gB. In another preferred embodiment, the polypeptide includes cysteine substitutions at Y242C and D714C (listed in row 14, column (iii) of Table 2) according to the numbering of SEQ ID NO: 1, relative to the amino acid sequence of the wild-type HCMV gB. In a further preferred embodiment, the polypeptide includes cysteine substitutions at S367C and L499C (listed in row 17, column (iii) of Table 2) according to the numbering of SEQ ID NO: 1, relative to the amino acid sequence of the wild-type HCMV gB. In a preferred embodiment, the polypeptide includes cysteine substitutions at T372C and W506C (listed in row 18, column (iii) of Table 2) according to the numbering of SEQ ID NO: 1, relative to the amino acid sequence of the wild-type HCMV gB. In another preferred embodiment, the polypeptide includes cysteine substitutions at S550C and D652C (listed in row 22, column (iii) of Table 2) according to the numbering of SEQ ID NO: 1, relative to the amino acid sequence of the wild-type HCMV gB. In a further preferred embodiment, the polypeptide includes cysteine substitutions at T608C and D679C (listed in row 26, column (iii) of Table 2) according to the numbering of SEQ ID NO: 1, relative to the amino acid sequence of the wild-type HCMV gB. In a preferred embodiment, the polypeptide includes cysteine substitutions at K695C and K724C (listed in row 34, column (iii) of Table 2) according to the numbering of SEQ ID NO: 1, relative to the amino acid sequence of the wild-type HCMV gB.

[0193] In a preferred embodiment, the polypeptide includes a disulfide bond between a pair of cysteine residues substituted at positions 96 and 660 according to the numbering of SEQ ID NO: 1, relative to the amino acid sequence of the wild-type HCMV gB. In another preferred embodiment, the polypeptide includes a disulfide bond between a pair of cysteine residues substituted at positions 98 and 658 according to the numbering of SEQ ID NO: 1, relative to the amino acid sequence of the wild-type HCMV gB. In a further preferred embodiment, the polypeptide includes a disulfide bond between a pair of cysteine residues substituted at positions 100 and 258 according to the numbering of SEQ ID NO: 1, relative to the amino acid sequence of the wild-type HCMV gB. In a preferred embodiment, the polypeptide includes a disulfide bond between a pair of cysteine residues substituted at positions 100 and 656 according to the numbering of SEQ ID NO: 1, relative to the amino acid sequence of the wild-type HCMV gB. In another preferred embodiment, the polypeptide includes a disulfide bond between a pair of cysteine residues substituted at positions 100 and 658 according to the numbering of SEQ ID NO: 1, relative to the amino acid sequence of the wild-type HCMV gB. In a further preferred embodiment, the polypeptide includes a disulfide bond between a pair of cysteine residues substituted at positions 117 and 406 according to the numbering of SEQ ID NO: 1, relative to the amino acid sequence of the wild-type HCMV gB. In a preferred embodiment, the polypeptide includes a disulfide bond between a pair of cysteine residues substituted at positions 117 and 407 according to the numbering of SEQ ID NO: 1, relative to the amino acid sequence of the wild-type HCMV gB. In a preferred embodiment, the polypeptide includes a disulfide bond between a pair of cysteine residues substituted at positions 153 and 712 according to the numbering of SEQ ID NO: 1, relative to the amino acid sequence of the wild-type HCMV gB. In a preferred embodiment, the polypeptide includes a disulfide bond between a pair of cysteine residues substituted at positions 162 and 716 according to the numbering of SEQ ID NO: 1, relative to the amino acid sequence of the wild-type HCMV gB. In a preferred embodiment, the polypeptide includes a disulfide bond between a pair of cysteine residues substituted at positions 217 and 587 according to the numbering of SEQ ID NO: 1, relative to the amino acid sequence of the wild-type HCMV gB. In a preferred embodiment, the polypeptide includes a disulfide bond between a pair of cysteine residues substituted at positions 217 and 589 according to the numbering of SEQ ID NO: 1, relative to the amino acid sequence of the wild-type HCMV gB. In a preferred embodiment, the polypeptide includes a disulfide bond between a pair of cysteine residues substituted at positions 219 and 584 according to the numbering of SEQ ID NO: 1, relative to the amino acid sequence of the wild-type HCMV gB. In a preferred embodiment, the polypeptide includes a disulfide bond between a pair of cysteine residues substituted at positions 219 and 585 according to the numbering of SEQ ID NO: 1, relative to the amino acid sequence of the wild-type HCMV gB. In a preferred embodiment, the polypeptide includes a disulfide bond between a pair of cysteine residues substituted at positions 219 and 586 according to the numbering of SEQ ID NO: 1, relative to the amino acid sequence of the wild-type HCMV gB. In a preferred embodiment, the polypeptide includes a disulfide bond between a pair of cysteine residues substituted at positions 220 and 659 according to the numbering of SEQ ID NO: 1, relative to the amino acid sequence of the wild-type HCMV gB. In a preferred embodiment, the polypeptide includes a disulfide bond between a pair of cysteine residues substituted at positions 223 and 659 according to the numbering of SEQ ID NO: 1, relative to the amino acid sequence of the wild-type HCMV gB. In a preferred embodiment, the polypeptide includes a disulfide bond between a pair of cysteine residues substituted at positions 240 and 732 according to the numbering of SEQ ID NO: 1, relative to the amino acid sequence of the wild-type HCMV gB. In a preferred embodiment, the polypeptide includes a disulfide bond between a pair of cysteine residues substituted at positions 240 and 735 according to the numbering of SEQ ID NO: 1, relative to the amino acid sequence of the wild-type HCMV gB. In a preferred embodiment, the polypeptide includes a disulfide bond between a pair of cysteine residues substituted at positions 242 and 728 according to the numbering of SEQ ID NO: 1, relative to the amino acid sequence of the wild-type HCMV gB. In a preferred embodiment, the polypeptide includes a disulfide bond between a pair of cysteine residues substituted at positions 242 and 731 according to the numbering of SEQ ID NO: 1, relative to the amino acid sequence of the wild-type HCMV gB. In a preferred embodiment, the polypeptide includes a disulfide bond between a pair of cysteine residues substituted at positions 258 and 656 according to the numbering of SEQ ID NO: 1, relative to the amino acid sequence of the wild-type HCMV gB. In a preferred embodiment, the polypeptide includes a disulfide bond between a pair of cysteine residues substituted at positions 269 and 656 according to the numbering of SEQ ID NO: 1, relative to the amino acid sequence of the wild-type HCMV gB. In a preferred embodiment, the polypeptide includes a disulfide bond between a pair of cysteine residues substituted at positions 269 and 658 according to the numbering of SEQ ID NO: 1, relative to the amino acid sequence of the wild-type HCMV gB. In a preferred embodiment, the polypeptide includes a disulfide bond between a pair of cysteine residues substituted at positions 272 and 614 according to the numbering of SEQ ID NO: 1, relative to the amino acid sequence of the wild-type HCMV gB. In a preferred embodiment, the polypeptide includes a disulfide bond between a pair of cysteine residues substituted at positions 273 and 629 according to the numbering of SEQ ID NO: 1, relative to the amino acid sequence of the wild-type HCMV gB. In a preferred embodiment, the polypeptide includes a disulfide bond between a pair of cysteine residues substituted at positions 349 and 650 according to the numbering of SEQ ID NO: 1, relative to the amino acid sequence of the wild-type HCMV gB. In a preferred embodiment, the polypeptide includes a disulfide bond between a pair of cysteine residues substituted at positions 367 and 500 according to the numbering of SEQ ID NO: 1, relative to the amino acid sequence of the wild-type HCMV gB. In a preferred embodiment, the polypeptide includes a disulfide bond between a pair of cysteine residues substituted at positions 367 and 503 according to the numbering of SEQ ID NO: 1, relative to the amino acid sequence of the wild-type HCMV gB. In a preferred embodiment, the polypeptide includes a disulfide bond between a pair of cysteine residues substituted at positions 370 and 501 according to the numbering of SEQ ID NO: 1, relative to the amino acid sequence of the wild-type HCMV gB. In a preferred embodiment, the polypeptide includes a disulfide bond between a pair of cysteine residues substituted at positions 522 and 683 according to the numbering of SEQ ID NO: 1, relative to the amino acid sequence of the wild-type HCMV gB. In a preferred embodiment, the polypeptide includes a disulfide bond between a pair of cysteine residues substituted at positions 523 and 683 according to the numbering of SEQ ID NO: 1, relative to the amino acid sequence of the wild-type HCMV gB. In a preferred embodiment, the polypeptide includes a disulfide bond between a pair of cysteine residues substituted at positions 523 and 684 according to the numbering of SEQ ID NO: 1, relative to the amino acid sequence of the wild-type HCMV gB. In a preferred embodiment, the polypeptide includes a disulfide bond between a pair of cysteine residues substituted at positions 524 and 684 according to the numbering of SEQ ID NO: 1, relative to the amino acid sequence of the wild-type HCMV gB. In a preferred embodiment, the polypeptide includes a disulfide bond between a pair of cysteine residues substituted at positions 525 and 681 according to the numbering of SEQ ID NO: 1, relative to the amino acid sequence of the wild-type HCMV gB. In a preferred embodiment, the polypeptide includes a disulfide bond between a pair of cysteine residues substituted at positions 540 and 680 according to the numbering of SEQ ID NO: 1, relative to the amino acid sequence of the wild-type HCMV gB. In a preferred embodiment, the polypeptide includes a disulfide bond between a pair of cysteine residues substituted at positions 541 and 680 according to the numbering of SEQ ID NO: 1, relative to the amino acid sequence of the wild-type HCMV gB. In a preferred embodiment, the polypeptide includes a disulfide bond between a pair of cysteine residues substituted at positions 548 and 655 according to the numbering of SEQ ID NO: 1, relative to the amino acid sequence of the wild-type HCMV gB. In a preferred embodiment, the polypeptide includes a disulfide bond between a pair of cysteine residues substituted at positions 549 and 658 according to the numbering of SEQ ID NO: 1, relative to the amino acid sequence of the wild-type HCMV gB. In a preferred embodiment, the polypeptide includes a disulfide bond between a pair of cysteine residues substituted at positions 550 and 655 according to the numbering of SEQ ID NO: 1, relative to the amino acid sequence of the wild-type HCMV gB. In a preferred embodiment, the polypeptide includes a disulfide bond between a pair of cysteine residues substituted at positions 550 and 657 according to the numbering of SEQ ID NO: 1, relative to the amino acid sequence of the wild-type HCMV gB. In a preferred embodiment, the polypeptide includes a disulfide bond between a pair of cysteine residues substituted at positions 591 and 668 according to the numbering of SEQ ID NO: 1, relative to the amino acid sequence of the wild-type HCMV gB. In a preferred embodiment, the polypeptide includes a disulfide bond between a pair of cysteine residues substituted at positions 603 and 667 according to the numbering of SEQ ID NO: 1, relative to the amino acid sequence of the wild-type HCMV gB. In a preferred embodiment, the polypeptide includes a disulfide bond between a pair of cysteine residues substituted at positions 604 and 672 according to the numbering of SEQ ID NO: 1, relative to the amino acid sequence of the wild-type HCMV gB. In a preferred embodiment, the polypeptide includes a disulfide bond between a pair of cysteine residues substituted at positions 607 and 688 according to the numbering of SEQ ID NO: 1, relative to the amino acid sequence of the wild-type HCMV gB. In a preferred embodiment, the polypeptide includes a disulfide bond between a pair of cysteine residues substituted at positions 608 and 692 according to the numbering of SEQ ID NO: 1, relative to the amino acid sequence of the wild-type HCMV gB. In a preferred embodiment, the polypeptide includes a disulfide bond between a pair of cysteine residues substituted at positions 609 and 691 according to the numbering of SEQ ID NO: 1, relative to the amino acid sequence of the wild-type HCMV gB. In a preferred embodiment, the polypeptide includes a disulfide bond between a pair of cysteine residues substituted at positions 610 and 674 according to the numbering of SEQ ID NO: 1, relative to the amino acid sequence of the wild-type HCMV gB. In a preferred embodiment, the polypeptide includes a disulfide bond between a pair of cysteine residues substituted at positions 610 and 675 according to the numbering of SEQ ID NO: 1, relative to the amino acid sequence of the wild-type HCMV gB. In a preferred embodiment, the polypeptide includes a disulfide bond between a pair of cysteine residues substituted at positions 612 and 663 according to the numbering of SEQ ID NO: 1, relative to the amino acid sequence of the wild-type HCMV gB. In a preferred embodiment, the polypeptide includes a disulfide bond between a pair of cysteine residues substituted at positions 737 and 755 according to the numbering of SEQ ID NO: 1, relative to the amino acid sequence of the wild-type HCMV gB. In a preferred embodiment, the polypeptide includes a disulfide bond between a pair of cysteine residues substituted at positions 741 and 754 according to the numbering of SEQ ID NO: 1, relative to the amino acid sequence of the wild-type HCMV gB. In a preferred embodiment, the polypeptide includes a disulfide bond between a pair of cysteine residues substituted at positions 741 and 755 according to the numbering of SEQ ID NO: 1, relative to the amino acid sequence of the wild-type HCMV gB.

[0194] In some embodiments, the polypeptide includes a combination of two or more of the disulfide bonds between cysteine residues listed in Table 2.

[0195] In some embodiments, the polypeptide includes an amino acid sequence having at least 80%, 81%, 82%, 83%, 84%, 85%, 86%, 87%, 88%, 89%, 90%, 91%, 92%, 93%, 94%, 95%, 96%, 97%, 98%, 99%, or 100% identity to any sequence selected from: SEQ ID NO: 2; SEQ ID NO: 3; SEQ ID NO: 4; SEQ ID NO: 5; SEQ ID NO: 6; SEQ ID NO: 7; SEQ ID NO: 8; SEQ ID NO: 9; SEQ ID NO: 10; SEQ ID NO: 11; SEQ ID NO: 12; SEQ ID NO: 13; SEQ ID NO: 14; SEQ ID NO: 15; SEQ ID NO: 16; SEQ ID NO: 17; SEQ ID NO: 18; SEQ ID NO: 19; SEQ ID NO: 20; SEQ ID NO: 21; SEQ ID NO: 22; SEQ ID NO: 23; SEQ ID NO: 24; SEQ ID NO: 25; SEQ ID NO: 26; SEQ ID NO: 27; SEQ ID NO: 28; SEQ ID NO: 29; SEQ ID NO: 30; SEQ ID NO: 31; SEQ ID NO: 32; SEQ ID NO: 33; SEQ ID NO: 34; SEQ ID NO: 35; SEQ ID NO: 36; and SEQ ID NO: 37.

[0196] In some embodiments, the polypeptide includes an amino acid sequence having at least 80%, 81%, 82%, 83%, 84%, 85%, 86%, 87%, 88%, 89%, 90%, 91%, 92%, 93%, 94%, 95%, 96%, 97%, 98%, 99%, or 100% identity to any sequence selected from: SEQ ID NO: 47, SEQ ID NO: 48, SEQ ID NO: 49, SEQ ID NO: 50, SEQ ID NO: 51, SEQ ID NO: 52, SEQ ID NO: 53, SEQ ID NO: 54, SEQ ID NO: 55, SEQ ID NO: 56, SEQ ID NO: 57, SEQ ID NO: 58, SEQ ID NO: 59, SEQ ID NO: 60, SEQ ID NO: 61, SEQ ID NO: 62, SEQ ID NO: 63, SEQ ID NO: 64, SEQ ID NO: 65, SEQ ID NO: 66, SEQ ID NO: 67, SEQ ID NO: 68, SEQ ID NO: 69, SEQ ID NO: 70, SEQ ID NO: 71, SEQ ID NO: 72, SEQ ID NO: 73, SEQ ID NO: 74, SEQ ID NO: 75, SEQ ID NO: 76, SEQ ID NO: 77, SEQ ID NO: 78, SEQ ID NO: 79, SEQ ID NO: 80, SEQ ID NO: 81, SEQ ID NO: 82, SEQ ID NO: 83, SEQ ID NO: 84, SEQ ID NO: 85, SEQ ID NO: 86, SEQ ID NO: 87, SEQ ID NO: 88, SEQ ID NO: 89, SEQ ID NO: 90, SEQ ID NO: 91, SEQ ID NO: 92, SEQ ID NO: 93, SEQ ID NO: 94, SEQ ID NO: 95, SEQ ID NO: 96, SEQ ID NO: 97, and SEQ ID NO: 98.

[0197] In some embodiments, the polypeptide includes an amino acid sequence having at least 80%, 81%, 82%, 83%, 84%, 85%, 86%, 87%, 88%, 89%, 90%, 91%, 92%, 93%, 94%, 95%, 96%, 97%, 98%, preferably 99%, or 100% identity to any sequence selected from SEQ ID NO: 56, SEQ ID NO: 57, SEQ ID NO: 58, and SEQ ID NO: 60.

[0198] In some embodiments, the polypeptide includes an amino acid sequence having at least 80%, 81%, 82%, 83%, 84%, 85%, 86%, 87%, 88%, 89%, 90%, 91%, 92%, 93%, 94%, 95%, 96%, 97%, 98%, preferably 99%, or 100% identity to any sequence selected from SEQ ID NO: 51, SEQ ID NO: 73, SEQ ID NO: 70, and SEQ ID NO: 78

[0199] In some embodiments, the composition preferably does not include a polypeptide having the sequence set forth in any one of SEQ ID NO: 59, SEQ ID NO: 75, SEQ ID NO: 76, SEQ ID NO: 71, SEQ ID NO: 52, SEQ ID NO: 96, and SEQ ID NO: 50.

[0200] In additional embodiments, the polypeptide includes the amino acid sequence as set forth in any one of the SEQ ID NOs listed in column (iv) of Table 2. That is, an exemplary polypeptide includes a polypeptide having the amino acid sequence selected from any one of: SEQ ID NO: 2; SEQ ID NO: 3; SEQ ID NO: 4; SEQ ID NO: 5; SEQ ID NO: 6; SEQ ID NO: 7; SEQ ID NO: 8; SEQ ID NO: 9; SEQ ID NO: 10; SEQ ID NO: 11; SEQ ID NO: 12; SEQ ID NO: 13; SEQ ID NO: 14; SEQ ID NO: 15; SEQ ID NO: 16; SEQ ID NO: 17; SEQ ID NO: 18; SEQ ID NO: 19; SEQ ID NO: 20; SEQ ID NO: 21; SEQ ID NO: 22; SEQ ID NO: 23; SEQ ID NO: 24; SEQ ID NO: 25; SEQ ID NO: 26; SEQ ID NO: 27; SEQ ID NO: 28; SEQ ID NO: 29; SEQ ID NO: 30; SEQ ID NO: 31; SEQ ID NO: 32; SEQ ID NO: 33; SEQ ID NO: 34; SEQ ID NO: 35; SEQ ID NO: 36; and SEQ ID NO: 37. In some embodiments, the polypeptide has the amino acid sequence selected from any one of SEQ ID NO: 47, SEQ ID NO: 48, SEQ ID NO: 49, SEQ ID NO: 50, SEQ ID NO: 51, SEQ ID NO: 52, SEQ ID NO: 53, SEQ ID NO: 54, SEQ ID NO: 55, SEQ ID NO: 56, SEQ ID NO: 57, SEQ ID NO: 58, SEQ ID NO: 59, SEQ ID NO: 60, SEQ ID NO: 61, SEQ ID NO: 62, SEQ ID NO: 63, SEQ ID NO: 64, SEQ ID NO: 65, SEQ ID NO: 66, SEQ ID NO: 67, SEQ ID NO: 68, SEQ ID NO: 69, SEQ ID NO: 70, SEQ ID NO: 71, SEQ ID NO: 72, SEQ ID NO: 73, SEQ ID NO: 74, SEQ ID NO: 75, SEQ ID NO: 76, SEQ ID NO: 77, SEQ ID NO: 78, SEQ ID NO: 79, SEQ ID NO: 80, SEQ ID NO: 81, SEQ ID NO: 82, SEQ ID NO: 83, SEQ ID NO: 84, SEQ ID NO: 85, SEQ ID NO: 86, SEQ ID NO: 87, SEQ ID NO: 88, SEQ ID NO: 89, SEQ ID NO: 90, SEQ ID NO: 91, SEQ ID NO: 92, SEQ ID NO: 93, SEQ ID NO: 94, SEQ ID NO: 95, SEQ ID NO: 96, SEQ ID NO: 97, and SEQ ID NO: 98.

[0201] In a preferred embodiment, the polypeptide includes the amino acid sequence as set forth in any one of SEQ ID NO: 3; SEQ ID NO: 6; SEQ ID NO: 8; SEQ ID NO: 14; SEQ ID NO: 15; SEQ ID NO: 18; SEQ ID NO: 19; SEQ ID NO: 23; SEQ ID NO: 27; and SEQ ID NO: 35.

[0202] In some embodiments, amino acids can be inserted (or deleted) from the native HCMV gB sequence to adjust the alignment of residues in the polypeptide structure, such that particular residue pairs are within a sufficiently close distance to form a disulfide bond in the prefusion, but not postfusion, conformation. In several such embodiments, the polypeptide includes a disulfide bond between cysteine residues located at any of the pairs of positions listed in one or more of rows 1, 2, 3, 4, 5, 6, 7, 8, 9, 10, 11, 12, 13, 14, 15, 16, 17, 18, 19, 20, 21, 22, 23, 24, 25, 26, 27, 28, 29, 30, 31, 32, 33, 34, 35, 36, 37, 38, 39, 40, 41, 42, 43, 44, 45, 46, 47, 48, 49, 50, 51, 52, 53, 54, 55, 56, 57, 58, 59, 60, 61, 62, 63, 64, 65, 66, 67, 68, 69, 70, 71, 72, 73, 74, 75, 76, 77, 78, 79, 80, 81, 82, 83, 84, 85, 86, 87, or 88 of column (ii) of Table 2, in addition to including at least one amino acid insertion.

[0203] In some embodiments, the polypeptide includes a phenylalanine substitution as compared to a native HCMV gB. In some embodiments, the polypeptide includes a leucine substitution as compared to a native HCMV gB. In some embodiments, the polypeptide may be stabilized by amino acid mutations (such as, for example, phenylalanine (F) and leucine (L) substitutions) that decrease ionic repulsion between resides that are proximate to each other in the folded structure of the polypeptide, as compared to a HCMV gB polypeptide in postfusion conformation. In some embodiments, the polypeptide may be stabilized by amino acid mutations that increase ionic attraction between residues that are proximate to each other in the folded structure of the polypeptide, as compared to a HCMV gB in postfusion conformation.

[0204] Exemplary mutations include any mutation selected from Table 3, according to the numbering of SEQ ID NO: 1 as compared to a native HCMV gB.

TABLE 3
Exemplary Phenylalanine (F) and Leucine (L) Substitutions

| | | (ii) Mutated | | (iv) |
|---|---|---|---|---|
| | | residue | | Exemplary |
| | | position, | | sequence that |
| | (i) | according to the | (iii) Substitutions | includes the |
| | Mutant | numbering of | corresponding to | mutation is set |
| Row | ID | SEQ ID NO: 1 | SEQ ID NO: 1 | forth in: |
| 1 | gB-037 | 670 | K670L | SEQ ID NO: 38 |
| 2 | gB-038 | 670 | K670F | SEQ ID NO: 39 |
| 3 | gB-039 | 673 | R673L | SEQ ID NO: 40 |
| 4 | gB-040 | 673 | R673F | SEQ ID NO: 41 |
| 5 | gB-041 | 691 | K691L | SEQ ID NO: 42 |
| 6 | gB-042 | 691 | K691F | SEQ ID NO: 43 |
| 7 | | 686 | E686L | |
| 8 | | 354 | R354F | |
| 9 | | 573 | R573F | |
| 10 | | 101 and 260 | D101L and K260L | |

TABLE 4
Further exemplary substitutions

| | | (ii) Mutated | | |
|---|---|---|---|---|
| | | residue | | (iv) Exemplary |
| | | position, | | sequence that |
| | (i) | according to the | (iii) Substitutions | includes the |
| | Mutant | numbering of | corresponding to | mutation is set |
| Row | ID | SEQ ID NO: 1 | SEQ ID NO: 1 | forth in: |
| 1 | gB-095 | 679 | D679S | SEQ ID NO: 99 |
| 2 | gB-096 | 679 | D679N | SEQ ID NO: 100 |
| 3 | gB-097 | 682 | E682S | SEQ ID NO: 101 |
| 4 | gB-098 | 682 | E682Q | SEQ ID NO: 102 |
| 5 | gB-099 | 686 | E686S | SEQ ID NO: 103 |
| 6 | gB-100 | 686 | E686Q | SEQ ID NO: 104 |
| 7 | gB-101 | 118 | N118P | SEQ ID NO: 105 |
| 8 | gB-102 | 646 | D646P | SEQ ID NO: 106 |
| 9 | | 686 | E686L | |
| 10 | | 686 | E686I | |
| 11 | | 679 | D679A | |
| 12 | | 354 | R354F | |
| 13 | | 573 | R573F | |
| 14 | | 101 and 260 | D101L and K260L | |
| 15 | | 217 and 589 | D217C and Y589C | |
| 16 | | 217, 589, 703, | D217C, Y589C, | |
| | | and 704 | D703C, and P704C | |
| 17 | | 217, 589, 696, | D217C, Y589C, | |
| | | and 697 | Y696C, and V697C | |
| 18 | | 217 and 589 | D217C and Y589C | |
| 19 | | 217 and 589 | D217C and Y589C | |
| 20 | | 217 and 589 | D217C and Y589C | |
| 21 | | 217 and 589 | D217C and Y589C | |
| 22 | | 217, 371, 506, | D217C, M371C, | |
| | | and 589 | W506C, and Y589C | |
| 23 | | 217, 524, 589, | D217C, N524C, | |
| | | and 684 | Y589C, M684C | |
| 24 | | 217, 524, 589, | D217C, N524C, | |
| | | 684, 703, and | Y589C, M684C, | |
| | | 704 | D703C, and P704C | |

[0205] In some embodiments, the polypeptide includes one or more (such as 2, 3, 4, 5, 6, 7, 8, 9 or 10) residues substituted at any one of the positions listed in one or more of rows 1, 2, 3, 4, 5, or 6 of column (ii) of Table 3, wherein the polypeptide does not exhibit an HCMV postfusion conformation.

[0206] In some embodiments, the polypeptide includes one or more (such as 2, 3, 4, 5, 6, 7, 8, 9 or 10) residues substituted at any one of the positions listed in one or more of rows 1, 2, 3, 4, 5, 6, 7, and 8 of column (ii) of Table 4, wherein the polypeptide does not exhibit an HCMV postfusion conformation.

[0207] In some embodiments, the polypeptide includes a mutation at position 670 (listed in rows 1 and 2, column (ii) of Table 3) according to the numbering of SEQ ID NO: 1. In some embodiments, the polypeptide includes a mutation at position 673 (listed in rows 3 and 4, column (ii) of Table 3) according to the numbering of SEQ ID NO: 1. In some embodiments, the polypeptide includes a mutation at position 691 (listed in rows 5 and 6, column (ii) of Table 3) according to the numbering of SEQ ID NO: 1.

[0208] In some embodiments, the polypeptide includes a mutation at position 670 according to the numbering of SEQ ID NO: 1. In some embodiments, the polypeptide includes a mutation at position 682 according to the numbering of SEQ ID NO: 1. In some embodiments, the polypeptide includes a mutation at position 686 according to the numbering of SEQ ID NO: 1. In some embodiments, the polypeptide includes a mutation at position 118 according to the numbering of SEQ ID NO: 1. In some embodiments, the polypeptide includes a mutation at position 646 according to the numbering of SEQ ID NO: 1.

[0209] In further embodiments, the polypeptide includes an electrostatic mutation that is introduced by substitutions at any one of the positions listed in one or more of rows 1, 2, 3, 4, 5, or 6 of column (iii) of Table 3, wherein the polypeptide does not exhibit an HCMV postfusion conformation.

[0210] In a preferred embodiment, the polypeptide includes a substitution K670 L (listed in row 1, column (iii) of Table 3) according to the numbering of SEQ ID NO: 1. In another preferred embodiment, the polypeptide includes a substitution K670F (listed in row 2, column (iii) of Table 3) according to the numbering of SEQ ID NO: 1. In a further preferred embodiment, the polypeptide includes a substitution R673 L (listed in row 3, column (iii) of Table 3) according to the numbering of SEQ ID NO: 1. In a preferred embodiment, the polypeptide includes a substitution R673F (listed in row 4, column (iii) of Table 3) according to the numbering of SEQ ID NO: 1. In another preferred embodiment, the polypeptide includes a substitution K691 L (listed in row 5, column (iii) of Table 3) according to the numbering of SEQ ID NO: 1. In a further preferred embodiment, the polypeptide includes a substitution K691F (listed in row 6, column (iii) of Table 3) according to the numbering of SEQ ID NO: 1.

[0211] In some embodiments, the polypeptide includes a combination of two or more of the phenylalanine (F) and leucine (L) substitutions listed in Table 3).

[0212] In a preferred embodiment, the polypeptide includes a substitution D679S according to the numbering of SEQ ID NO: 1. In another preferred embodiment, the polypeptide includes a substitution D679N according to the numbering of SEQ ID NO: 1. In another preferred embodiment, the polypeptide includes a substitution E682S according to the numbering of SEQ ID NO: 1. In another preferred embodiment, the polypeptide includes a substitution E682Q according to the numbering of SEQ ID NO: 1. In another preferred embodiment, the polypeptide includes a substitution E686S according to the numbering of SEQ ID NO: 1. In another preferred embodiment, the polypeptide includes a substitution E686Q according to the numbering of SEQ ID NO: 1. In another preferred embodiment, the polypeptide includes a substitution N118P according to the numbering of SEQ ID NO: 1. In another preferred embodiment, the polypeptide includes a substitution D646P according to the numbering of SEQ ID NO: 1.

[0213] In some embodiments, the polypeptide includes a combination of two or more of the phenylalanine (F) and leucine (L) substitutions listed in Table 4. In some embodiments, the polypeptide includes an amino acid sequence having at least 80%, 81%, 82%, 83%, 84%, 85%, 86%, 87%, 88%, 89%, 90%, 91%, 92%, 93%, 94%, 95%, 96%, 97%, 98%, 99%, or 100% identity to any sequence selected from: SEQ ID NO: 38; SEQ ID NO: 39; SEQ ID NO: 40; SEQ ID NO: 41; SEQ ID NO: 42; and SEQ ID NO: 43.

[0214] In some embodiments, the polypeptide includes an amino acid sequence having at least 80%, 81%, 82%, 83%, 84%, 85%, 86%, 87%, 88%, 89%, 90%, 91%, 92%, 93%, 94%, 95%, 96%, 97%, 98%, 99%, or 100% identity to any sequence selected from: SEQ ID NO: 99; SEQ ID NO: 100, SEQ ID NO: 102, SEQ ID NO: 103, SEQ ID NO: 104, SEQ ID NO: 105, and SEQ ID NO: 106.

[0215] In additional embodiments, the polypeptide includes the amino acid sequence as set forth in any one of the SEQ ID NOs listed in column (iv) of Table 3. That is, an exemplary polypeptide includes a polypeptide having the amino acid sequence selected from any one of: SEQ ID NO: 38; SEQ ID NO: 39; SEQ ID NO: 40; SEQ ID NO: 41; SEQ ID NO: 42; and SEQ ID NO: 43. In some embodiments, the polypeptide has the amino acid sequence selected from any one of: SEQ ID NO: 99; SEQ ID NO: 100, SEQ ID NO: 102, SEQ ID NO: 103, SEQ ID NO: 104, SEQ ID NO: 105, and SEQ ID NO: 106.

[0216] In some embodiments, amino acids can be inserted (or deleted) from the native HCMV gB sequence to adjust the alignment of residues in the polypeptide structure, such that particular residue pairs are within a sufficiently close distance to form a desired electrostatic interaction in the prefusion, but not postfusion, conformation. In several such embodiments, the polypeptide includes a desired electrostatic interaction at any of the positions listed in one or more of rows 1, 2, 3, 4, 5, or 6 of column (ii) of Table 3, wherein the polypeptide does not exhibit an HCMV postfusion conformation.

### C.2. Further Embodiments of the Polypeptide

[0217] In some embodiments, the polypeptide does not include a mutation at any one of the following amino acid positions: 280, 281, 283, 284, 285, 286, 290, 292, 295, 297, 298, 299, or any combinations thereof, according to the numbering of reference sequence SEQ ID NO: 46. In some exemplary embodiments, the polypeptide does not include a substitution of any one of the following residues, according to the numbering of reference sequence SEQ ID NO: 46: Y280; N281; T283; N284; R285; N286; F290; E292; N293; F297; F298; 1299; F298; and any combinations thereof. Without being bound by theory or mechanism, residues important for neutralizing antibodies may include Y280/N284 and Y280/N293/D295. Accordingly, in a preferred embodiment, the polypeptide does not include mutations at Y280, N293, N284, and D295, as compared to reference sequence SEQ ID NO: 46.

[0218] In some embodiments, the polypeptide does not include a mutation at any one of the following amino acid positions: R562, P577, S587, Y588, G592, G595, L601/H605, C610, L612, P613, Y625, Y627, F632, and K633, and any combinations thereof, according to the numbering of reference sequence SEQ ID NO: 44. In some embodiments, the polypeptide does not include any one of the following amino acid mutations: R562C, P577 L, S587 L, Y588C, G592S, G595D, L601P/H605N, C610Y, L612F, P613Y, Y625C, Y627C, F632 L, and K633T, or any combinations thereof, according to the numbering of reference sequence SEQ ID NO: 44. Without being bound by theory or mechanism, P577 and Y627 are believed to be located next to each other within the domain IV core while C610 participates in a conserved disulfide bond. Thus, all three residues may help maintain the position of domain IV in the prefusion structure and, therefore, the stability of entire antigenic site AD-1. Moreover, without being bound by theory or mechanism, F632 and G595 are believed to be exposed on the surface of the prefusion form of gB. Accordingly, in a preferred embodiment, the polypeptide does not include a mutation at P577, Y627, C610, F632, and G595, or any combinations thereof, according to the numbering of reference sequence SEQ ID NO: 44.

### C.3. Cavity Filling Mutations

[0219] In still other embodiments, the polypeptide includes amino acid mutations that are one or more cavity filling mutations. Examples of amino acids that may be replaced with the goal of cavity filling include small aliphatic (e.g. Gly, Ala, and Val) or small polar amino acids (e.g. Ser and Thr) and amino acids that are buried in the pre-fusion conformation, but exposed to solvent in the post-fusion conformation. Examples of the replacement amino acids include large aliphatic amino acids (Ile, Leu and Met) or large aromatic amino acids (His, Phe, Tyr and Trp).

### C.4. Combination of Mutations

[0220] In another aspect, the present invention relates to a polypeptide that includes a combination of two or more different types of mutations selected from engineered disulfide bond mutations, cavity filling mutations, and electrostatic mutations, each as described herein above. In some embodiments, the polypeptide includes at least one disulfide bond mutation and at least electrostatic mutation. More specifically, in some embodiments, the polypeptide includes at least one cysteine substitution and at least one phenylalanine substitution. In some embodiments, the polypeptide includes at least one cysteine substitution and at least one leucine substitution.

[0221] In some further embodiments, the polypeptide includes at least one mutation selected from any one of the mutations in Table 2 and at least one mutation selected from any one of the mutations in Table 3. In some further embodiments, the polypeptide includes at least one mutation selected from any one of the mutations in Table 2 and at least one mutation selected from any one of the mutations in Table 4. In some further embodiments, the polypeptide includes at least one mutation selected from any one of the mutations in Table 3 and at least one mutation selected from any one of the mutations in Table 4.

### D. Druggable Regions of HCMV gB Polypeptide

[0222] The present invention provides, in part. novel druggable regions in the HCMV gB protein. The interaction of a drug with such regions, or the modulation of the activity of such regions with a drug, could inhibit viral fusion and hence viral infectivity. In one aspect, the present invention provides methods of screening compounds against these druggable regions in order to discover a candidate therapeutic for HCMV infection caused by HCMV having gB protein, for example such as a small molecule viral fusion inhibitor. In one embodiment, a method for identifying a candidate therapeutic for a HCMV infection caused by HCMV having gB protein comprises contacting a gB protein which comprises a druggable region with a compound, wherein binding of said compound indicates a candidate therapeutic. Compounds may in certain embodiments be selected from the following classes: peptides, polypeptides, peptidomimetics, or small molecules, or may be selected from a library of compounds. Such a library may be generated by combinatorial synthetic methods. Binding may be assayed either in vitro or in vivo. In certain embodiments of this method, the protein is HCMV gB protein and comprises at least one residue, preferably three residues, from a druggable region of HCMV gB protein. Such druggable regions also may be utilized in the structure determination, drug screening, drug design, and other methods described and claimed herein.

[0223] The term “druggable region”, when used in reference to a polypeptide, nucleic acid, complex and the like, refers to a region of HCMV gB protein which is a target or is a likely target for binding an agent that reduces or inhibits viral infectivity. For a polypeptide, a druggable region generally refers to a region wherein several amino acids of a polypeptide would be capable of interacting with an agent. For a polypeptide or complex thereof, exemplary druggable regions include binding pockets and sites, interfaces between domains of a polypeptide or complex, surface grooves or contours or surfaces of a polypeptide or complex which are capable of participating in interactions with another molecule, such as a cell membrane.

[0224] A druggable region may be described and characterized in a number of ways. For example, a druggable region may be characterized by some or all of the amino acids that make up the region, or the backbone atoms thereof, or the side chain atoms thereof (optionally with or without Ca atoms). Alternatively, a druggable region may be characterized by comparison to other regions on the same or other molecules. For example, the term “affinity region” refers to a druggable region on a molecule (such as a HCMV gB protein) that is present in several other molecules, in so much as the structures of the same affinity regions are sufficiently the same so that they are expected to bind the same or related structural analogs. An example of an affinity region is an ATP-binding site of a protein kinase that is found in several protein kinases (whether or not of the same origin). The term “selectivity-region” refers to a druggable region of a molecule that may not be found on other molecules, in so much as the structures of different selectivity regions are sufficiently different so that they are not expected to bind the same or related structural analogs. An exemplary selectivity region is a catalytic domain of a protein kinase that exhibits specificity for one substrate. In certain instances, a single modulator may bind to the same affinity region across a number of proteins that have a substantially similar biological function, whereas the same modulator may bind to only one selectivity region of one of those proteins.

[0225] Continuing with examples of different druggable regions, the term “undesired region” refers to a druggable region of a molecule that upon interacting with another molecule results in an undesirable effect. For example, a binding site that oxidizes the interacting molecule (such as P-450 activity) and thereby results in increased toxicity for the oxidized molecule may be deemed a “undesired region”. Other examples of potential undesired regions include regions that upon interaction with a drug decrease the membrane permeability of the drug, increase the excretion of the drug, or increase the blood brain transport of the drug. It may be the case that, in certain circumstances, an undesired region will no longer be deemed an undesired region because the affect of the region will be favorable, e.g., a drug intended to treat a brain condition would benefit from interacting with a region that resulted in increased blood brain transport, whereas the same region could be deemed undesirable for drugs that were not intended to be delivered to the brain.

[0226] When used in reference to a druggable region, the “selectivity” or “specificity” of a molecule such as a modulator to a druggable region may be used to describe the binding between the molecule and a druggable region. For example, the selectivity of a modulator with respect to a druggable region may be expressed by comparison to another modulator, using the respective values of Kd (i.e., the dissociation constants for each modulator-druggable region complex) or, in cases where a biological effect is observed below the Kd, the ratio of the respective EC50's (i.e., the concentrations that produce 50% of the maximum response for the modulator interacting with each druggable region).

[0227] The term “modulation”, when used in reference to a functional property or biological activity or process (e.g., enzyme activity or receptor binding), refers to the capacity to either up regulate (e.g., activate or stimulate), down regulate (e.g., inhibit or suppress) or otherwise change a quality of such property, activity or process. In certain instances, such regulation may be contingent on the occurrence of a specific event, such as activation of a signal transduction pathway, and/or may be manifest only in particular cell types.

[0228] The term “modulator” refers to a peptide, polypeptide, nucleic acid, macromolecule, complex, molecule, small molecule, compound, species or the like (naturally-occurring or non-naturally-occurring), or an extract made from biological materials such as bacteria, plants, fungi, or animal cells or tissues, that may be capable of causing modulation. Modulators may be evaluated for potential activity as modulators or activators (directly or indirectly) of a functional property, biological activity or process, or combination of them, (e.g., agonist, partial antagonist, partial agonist, inverse agonist, antagonist, anti-microbial agents, modulators of microbial infection or proliferation, and the like) by inclusion in assays. In such assays, many modulators may be screened at one time. The activity of a modulator may be known, unknown or partially known. The term “inhibitor” refers to a peptide, polypeptide, nucleic acid, macromolecule, complex, molecule, small molecule, compound, species or the like (naturally-occurring or non-naturally-occurring), or an extract made from biological materials such as bacteria, plants, fungi, or animal cells or tissues, that may be capable of down-regulating or suppressing a functional property or biological activity or process.

[0229] The term “motif” refers to an amino acid sequence that is commonly found in a protein of a particular structure or function. Typically, a consensus sequence is defined to represent a particular motif. The consensus sequence need not be strictly defined and may contain positions of variability, degeneracy, variability of length, etc. The consensus sequence may be used to search a database to identify other proteins that may have a similar structure or function due to the presence of the motif in its amino acid sequence. For example, on-line databases may be searched with a consensus sequence in order to identify other proteins containing a particular motif. Various search algorithms and/or programs may be used, including FASTA, BLAST or ENTREZ. FASTA and BLAST are available as a part of the GCG sequence analysis package (University of Wisconsin, Madison, Wis.). ENTREZ is available through the National Center for Biotechnology Information, National Library of Medicine, National Institutes of Health, Bethesda, Md.

[0230] The term “small molecule” refers to a compound, which has a molecular weight of less than about 5 kD, less than about 2.5 kD, less than about 1.5 kD, or less than about 0.9 kD. Small molecules may be, for example, nucleic acids, peptides, polypeptides, peptide nucleic acids, peptidomimetics, carbohydrates, lipids or other organic (carbon containing) or inorganic molecules. Many pharmaceutical companies have extensive libraries of chemical and/or biological mixtures, often fungal, bacterial, or algal extracts, which can be screened with any of the assays of the invention. The term “small organic molecule” refers to a small molecule that is often identified as being an organic or medicinal compound, and does not include molecules that are exclusively nucleic acids, peptides or polypeptides.

[0231] In one embodiment, the druggable region comprises residues K130-A135, D216-W233, R258-K260, A267-V273, R327-D329, W349-E350, V480-K518 and N676-Y690 of SEQ ID NO: 1, which residues form the binding pocket for Domain V of HCMV gB protein in the postfusion conformation.

[0232] In yet another embodiment, a druggable region comprises a fusion loop or a portion thereof.

[0233] In another aspect, the present invention is directed towards methods for identifying a candidate therapeutic for a disease caused by HCMV having gB protein. In certain embodiments, such methods comprise contacting the gB protein which comprises a druggable region with a compound, wherein the modulation of the activity of said gB protein indicates a candidate therapeutic. In other embodiments, such methods comprise contacting the gB protein which comprises a druggable region with a compound, wherein the preclusion of the movement or interaction of said druggable region indicates a candidate therapeutic. In still other embodiments, the modulation of the function or activity of said gB protein involves precluding the completion of the post-fusion conformational change. In yet another embodiment, the modulation of the function or activity of said gB protein involves interfering with the first stage of the conformational change. In another embodiment, a method for identifying a candidate therapeutic for a disease caused by infection with HCMV having gB protein comprises contacting the gB protein which comprises a druggable region with a compound, wherein the inhibition of fusion in said virus indicates a candidate therapeutic. In yet another embodiment, a method for identifying a candidate therapeutic for a disease caused by infection with HCMV having gB protein, comprising contacting the gB protein which comprises a druggable region with a compound, wherein the inhibition of viral infectivity of said HCMV indicates a candidate therapeutic. In still another embodiment, a method for identifying a candidate therapeutic for disease caused by infection with HCMV having gB protein comprises contacting the gB protein which comprises a druggable region with a compound, wherein the reduction of at least one symptom of said disease in a subject indicates a candidate therapeutic.

[0234] In a further embodiment, the invention provides a method for identifying a candidate therapeutic for disease caused by infection with HCMV having gB protein comprising contacting the gB protein which comprises a druggable region with a compound, wherein the compound prevents Domain V of the gB protein or a fragment thereof from binding in its binding pocket. In one embodiment, the binding pocket for Domain V of the gB protein comprises residues K130-A135, D216-W233, R258-K260, A267-V273, R327-D329, W349-E350, V480-K518 and N676-Y690 of SEQ ID NO:1.

[0235] In another aspect, all of the information learned and described herein about the gB protein may be used in methods of designing modulators of one or more of their biological activities. In one embodiment, a method for designing a modulator for the prevention or treatment of a disease caused by infection with HCMV having gB protein, comprises: (a) providing a three-dimensional structure for gB protein; (b) identifying a potential modulator for the prevention or treatment of disease caused by HCMV having gB protein by reference to the three-dimensional structure; (c) contacting the gB protein with the potential modulator; and (d) assaying the activity of the gB protein or determining the viability of the virus having said gB protein after contact with the modulator, wherein a change in the activity of the polypeptide or the viability of the virus indicates that the modulator may be useful for prevention or treatment of a virus-related disease or disorder. In certain embodiments, the potential modulator is identified by reference to the three-dimensional structure of HCMV having gB protein. In other embodiments, the potential modulator is identified by reference to the three-dimensional structure comprising a druggable region or fragment of the gB protein.

[0236] In yet another aspect, the present invention provides modulators (in certain embodiments, inhibitors) of gB protein activity, as well as pharmaceutical compositions and kits comprising the same. Such modulators may in certain embodiments interact with a druggable region of the invention. In still another aspect, the present invention is directed toward a modulator that is a fragment of (or homolog of such fragment or mimetic of such fragment) the druggable region of a HCMV gB protein and competes with that druggable region. Modulators of any of the above-described druggable regions may be used alone or in complementary approaches to treat infection by HCMV.

[0237] Finally, the present invention is directed toward methods of identifying and designing modulators which bind with, interact with, or modulate the function or activity of an active or binding site of a HCMV gB polypeptide.

[0238] As used herein, the term “compound” shall include, but not be limited to, a modulator, an inhibitor, a therapeutic, a therapeutic drug, a prophylactic, a drug, or an agent. As used herein, the term “candidate therapeutic” (also known as a “candidate agent” or “test agent”) shall include, but not be limited to, a compound, detergents, proteins, peptides, peptidomimetics, antibodies, nucleic acids, small molecules, cytokines, or hormones.

[0239] Set forth below are aspects of drug discovery useful for the practice of this invention by one of skill in the art.

### D.1. Druggable Regions

[0240] In one embodiment, the druggable region comprises residues K130-A135, D216-W233, R258-K260, A267-V273, R327-D329, W349-E350, V480-K518 and N676-Y690 of SEQ ID NO:1 or a fragment thereof. These residues form the binding pocket for Domain V of the gB protein or a portion thereof in the postfusion conformation. As used herein, the terms “binding pocket” and “binding groove” shall have the same meaning and are interchangeable.

[0241] In another embodiment, a druggable region comprises a fusion loop or a portion thereof.

[0242] In yet another aspect, the present invention is directed toward methods of identifying and designing modulators which bind with, interact with, or modulate the function or activity of an active or binding site of a HCMV gB protein.

### D.2. Modulators, Modulator Design and Screening Using the Subject Druggable Regions

[0243] In one aspect, the present invention provides methods of screening for potential modulators of the subject druggable regions, as well as methods of designing such modulators. Modulators to HCMV gB polypeptides of the invention and other structurally related molecules, and complexes containing the same, may be identified and developed as set forth below and otherwise using techniques and methods known to those of skill in the art. The modulators of the invention may be employed, for instance, to inhibit and treat disease caused by HCMV.

[0244] In one aspect, the present invention is directed towards a modulator that interacts with the subject druggable regions so as to reduce the activity of the HCMV. Such modulators may in certain embodiments interact with a druggable region of the virus. In certain embodiments, a modulator interacts with the binding pocket for Domain V of the gB polypeptide so as to preclude Domain V from binding in the pocket, thereby modulating the activity of the HCMV. In still another aspect, the present invention is directed toward a modulator that is a fragment of Domain V of the HCMV gB protein (or homolog of such fragment or mimetic of such fragment) and competes with the druggable region, i.e. the binding pocket for Domain V. In one aspect, modulators comprise fragments of Domain V which are selected from the group consisting of fragments having residues (Towne strain) M648-K700, M648-V697, S647-V697, S647-V663, 1653-V697, 1653-Q692, 1653-L680, 1653-S675, 1653-Y667, R662-V697, R662-Q692, R662-L680, R662-S675, L664-F678, S668-V697, S668-Q692, S668-V677, D679-V697, L680-V697, L680-Q692, and R693-K700 of SEQ ID NO: 1. More specifically, the modulators are fragments of SEQ ID NO:1 having residues M648-K700 (SEQ ID NO: 260), M648-V697 (SEQ ID NO: 261), S647-V697 (SEQ ID NO: 262), S647-V663 (SEQ ID NO: 263), 1653-V697 (SEQ ID NO: 264), 1653-Q692 (SEQ ID NO: 265), 1653-L680 (SEQ ID NO: 266), 1653-S675 (SEQ ID NO: 267), 1653-Y667 (SEQ ID NO: 268), R662-V697 (SEQ ID NO: 269), R662-Q692 (SEQ ID NO: 270), R662-L680 (SEQ ID NO: 271), R662-S675 (SEQ ID NO: 272), L664-F678 (SEQ ID NO: 273), S668-V697 (SEQ ID NO: 274), S668-Q692 (SEQ ID NO: 275), S668-V677 (SEQ ID NO: 276), D679-V697 (SEQ ID NO: 277), L680-V697 (SEQ ID NO: 278), L680-Q692 (SEQ ID NO: 279), and R693-K700 (SEQ ID NO: 280).

[0245] Modulators of any of the above-described druggable regions may be used alone or in complementary approaches to treat or prevent HCMV infections.

[0246] A variety of methods for inhibiting the growth or infectivity of HCMV using the modulators are contemplated by the present invention. For example, exemplary methods involve contacting a HCMV gB protein with a modulator thought or shown to be effective against such pathogen.

[0247] For example, in one aspect, the present invention contemplates a method for treating a subject suffering from an infection of HCMV comprising administering to the subject an amount of a modulator effective to modulate the expression and/or activity of HCMV. The present invention further contemplates a method for treating a subject suffering from an HCMV infection, comprising administering to the subject having the infection a therapeutically effective amount of a molecule identified using one of the methods of the present invention.

[0248] In another embodiment, the present invention contemplates a method for preventing infection of HCMV in a subject by stimulating an immune response to HCMV. An immune response can be stimulated by administering to the subject an amount of a modulator effective to modulate the expression and/or activity of HCMV. In some embodiments the immune response induced is a protective immune response, i.e., the response reduces the risk or severity of or clinical consequences of a CMV infection. Stimulating a protective immune response is particularly desirable in some populations particularly at risk from CMV infection and disease. For example, at-risk populations include solid organ transplant (SOT) patients, bone marrow transplant patients, and hematopoietic stem cell transplant (HSCT) patients. Modulators can be administered to a transplant donor pre-transplant, or a transplant recipient pre- and/or post-transplant. Because vertical transmission from mother to child is a common source of infecting infants, administering modulators to a woman who is pregnant or can become pregnant is particularly useful.

[0249] In certain instances, the subject is a mammal. In some embodiments, the mammal is a human. In some embodiments, the human is a child, such as an infant. In some other embodiments, the human is female, including an adolescent female, a female of childbearing age, a female who is planning pregnancy, a pregnant female, and females who recently gave birth. In some embodiments, the human is a transplant patient.

[0250] For CMVs of nonhuman mammals, such as rhesus monkeys, guinea pigs, or mice, homologous sequences and their mimetics are expected to have the same properties and be used for experimental, prophylactic, or therapeutic purposes in those nonhuman mammals. Because CMVs are highly species specific, construction of animal CMV (including, but not limited to, mouse CMV, guinea pig CMV, and rhesus CMV) homologues of the HCMV domain V and testing them for binding and inhibition of activity of the animal CMV homologues of gB and for the inhibition of infection of the animals by MCMV, gpCMV, and rhCMV are also contemplated in this invention.

[0251] In another embodiment, modulators or inhibitors of HCMV, or biological complexes containing them, may be used in the manufacture of a medicament for any number of uses, including, for example, preventing or treating any disease or other treatable condition of a subject (including humans and animals), and particularly a disease caused by HCMV infection.

### (i) Modulator Design

[0252] A number of techniques can be used to screen, identify, select and design chemical entities capable of associating with a HCMV gB polypeptide, structurally homologous molecules, and other molecules. Knowledge of the structure for a HCMV gB polypeptide, determined in accordance with the methods described herein, permits the design and/or identification of molecules and/or other modulators which have a shape complementary to the conformation of a HCMV gB polypeptide, or more particularly, a druggable region thereof. It is understood that such techniques and methods may use, in addition to the exact structural coordinates and other information for a HCMV gB polypeptide, structural equivalents thereof described above (including, for example, those structural coordinates that are derived from the structural coordinates of amino acids contained in a druggable region as described above).

[0253] The term “chemical entity,” as used herein, refers to chemical compounds, complexes of two or more chemical compounds, and fragments of such compounds or complexes. In certain instances, it is desirable to use chemical entities exhibiting a wide range of structural and functional diversity, such as compounds exhibiting different shapes (e.g., flat aromatic rings(s), puckered aliphatic rings(s), straight and branched chain aliphatics with single, double, or triple bonds) and diverse functional groups (e.g., carboxylic acids, esters, ethers, amines, aldehydes, ketones, and various heterocyclic rings).

[0254] In one aspect, the method of drug design generally includes computationally evaluating the potential of a selected chemical entity to associate with any of the molecules or complexes of the present invention (or portions thereof). For example, this method may include the steps of (a) employing computational means to perform a fitting operation between the selected chemical entity and a druggable region of the molecule or complex; and (b) analyzing the results of said fitting operation to quantify the association between the chemical entity and the druggable region.

[0255] A chemical entity may be examined either through visual inspection or through the use of computer modeling using a docking program such as GRAM, DOCK, or AUTODOCK (Dunbrack et al., Folding & Design, 2:27-42 (1997)). This procedure can include computer fitting of chemical entities to a target to ascertain how well the shape and the chemical structure of each chemical entity will complement or interfere with the structure of a HCMV gB polypeptide (Bugg et al., Scientific American, December: 92-98 (1993); West et al., TIPS, 16:67-74 (1995)). Computer programs may also be employed to estimate the attraction, repulsion, and steric hindrance of the chemical entity to a druggable region, for example. Generally, the tighter the fit (e.g., the lower the steric hindrance, and/or the greater the attractive force) the more potent the chemical entity will be because these properties are consistent with a tighter binding constant. Furthermore, the more specificity in the design of a chemical entity the more likely that the chemical entity will not interfere with related proteins, which may minimize potential side-effects due to unwanted interactions.

[0256] A variety of computational methods for molecular design, in which the steric and electronic properties of druggable regions are used to guide the design of chemical entities, are known: Cohen et al. (1990) J. Med. Cam. 33: 883-894; Kuntz et al. (1982) J. Mol. Biol. 161: 269-288; DesJarlais (1988) J. Med. Cam. 31: 722-729; Bartlett et al. (1989) Spec. Publ., Roy. Soc. Chem. 78: 182-196; Goodford et al. (1985) J. Med. Cam. 28: 849-857; and DesJarlais et al. J. Med. Cam. 29: 2149-2153. Directed methods generally fall into two categories: (1) design by analogy in which 3-D structures of known chemical entities (such as from a crystallographic database) are docked to the druggable region and scored for goodness-of-fit; and (2) de novo design, in which the chemical entity is constructed piece-wise in the druggable region. The chemical entity may be screened as part of a library or a database of molecules. Databases which may be used include ACD (Molecular Designs Limited), NCI (National Cancer Institute), CCDC (Cambridge Crystallographic Data Center), CAST (Chemical Abstract Service), Derwent (Derwent Information Limited), Maybridge (Maybridge Chemical Company Ltd), Aldrich (Aldrich Chemical Company), DOCK (University of California in San Francisco), and the Directory of Natural Products (Chapman & Hall). Computer programs such as CONCORD (Tripos Associates) or DB-Converter (Molecular Simulations Limited) can be used to convert a data set represented in two dimensions to one represented in three dimensions.

[0257] Chemical entities may be tested for their capacity to fit spatially with a druggable region or other portion of a target protein. As used herein, the term “fits spatially” means that the three-dimensional structure of the chemical entity is accommodated geometrically by a druggable region. A favorable geometric fit occurs when the surface area of the chemical entity is in close proximity with the surface area of the druggable region without forming unfavorable interactions. A favorable complementary interaction occurs where the chemical entity interacts by hydrophobic, aromatic, ionic, dipolar, or hydrogen donating and accepting forces. Unfavorable interactions may be steric hindrance between atoms in the chemical entity and atoms in the druggable region.

[0258] If a model of the present invention is a computer model, the chemical entities may be positioned in a druggable region through computational docking. If, on the other hand, the model of the present invention is a structural model, the chemical entities may be positioned in the druggable region by, for example, manual docking. As used herein the term “docking” refers to a process of placing a chemical entity in close proximity with a druggable region, or a process of finding low energy conformations of a chemical entity/druggable region complex.

[0259] In an illustrative embodiment, the design of potential modulator begins from the general perspective of shape complimentary for the druggable region of a HCMV gB polypeptide, and a search algorithm is employed which is capable of scanning a database of small molecules of known three-dimensional structure for chemical entities which fit geometrically with the target druggable region. Most algorithms of this type provide a method for finding a wide assortment of chemical entities that are complementary to the shape of a druggable region of a HCMV gB polypeptide. Each of a set of chemical entities from a particular database, such as the Cambridge Crystallographic Data Bank (CCDB) (Allen et al. (1973) J. Chem. Doc. 13: 119), is individually docked to the druggable region of a HCMV gB polypeptide in a number of geometrically permissible orientations with use of a docking algorithm. In certain embodiments, a set of computer algorithms called DOCK, can be used to characterize the shape of invaginations and grooves that form the active sites and recognition surfaces of the druggable region (Kuntz et al. (1982) J. Mol. Biol. 161: 269-288). The program can also search a database of small molecules for templates whose shapes are complementary to particular binding sites of a HCMV gB polypeptide (DesJarlais et al. (1988) J Med Chem 31: 722-729).

[0260] The orientations are evaluated for goodness-of-fit and the best are kept for further examination using molecular mechanics programs, such as AMBER or CHARMM. Such algorithms have previously proven successful in finding a variety of chemical entities that are complementary in shape to a druggable region.

[0261] Goodford (1985, J Med Chem 28:849-857) and Boobbyer et al. (1989, J Med Chem 32:1083-1094) have produced a computer program (GRID) which seeks to determine regions or high affinity for different chemical groups (termed probes) of the druggable region. GRID hence provides a tool for suggesting modifications to known chemical entities that might enhance binding. It may be anticipated that some of the sites discerned by GRID as regions of high affinity correspond to “pharmacophoric patterns” determined interferentially from a series of known ligands. As used herein, a “pharmacophoric pattern” is a geometric arrangement of features of chemical entities that is believed to be important for binding. Attempts have been made to use pharmacophoric patterns as a search screen for novel ligands (Jakes et al. (1987) J Mol Graph 5:41-48; Brint et al. (1987) J Graph 5:49-56; Jakes et al. (1986) J Mol Graph 4:12-20).

[0262] Yet a further embodiment of the present invention utilizes a computer algorithm such as CLIX which searches such databases as CCDB for chemical entities which can be oriented with the druggable region in a way that is both sterically acceptable and has a high likelihood of achieving favorable chemical interactions between the chemical entity and the surrounding amino acid residues. The method is based on characterizing the region in terms of an ensemble of favorable binding positions for different chemical groups and then searching for orientations of the chemical entities that cause maximum spatial coincidence of individual candidate chemical groups with members of the ensemble. The algorithmic details of CLIX is described in Lawrence et al. (1992) Proteins 12:31-41.

[0263] In this way, the efficiency with which a chemical entity may bind to or interfere with a druggable region may be tested and optimized by computational evaluation. For example, for a favorable association with a druggable region, a chemical entity must preferably demonstrate a relatively small difference in energy between its bound and fine states (i.e., a small deformation energy of binding). Thus, certain, more desirable chemical entities will be designed with a deformation energy of binding of not greater than about 10 kcal/mole, and more preferably, not greater than 7 kcal/mole. Chemical entities may interact with a druggable region in more than one conformation that is similar in overall binding energy. In those cases, the deformation energy of binding is taken to be the difference between the energy of the free entity and the average energy of the conformations observed when the chemical entity binds to the target.

[0264] In this way, the present invention provides computer-assisted methods for identifying or designing a potential modulator of the activity of a HCMV gB polypeptide including: supplying a computer modeling application with a set of structure coordinates of a molecule or complex, the molecule or complex including at least a portion of a druggable region from a HCMV gB polypeptide; supplying the computer modeling application with a set of structure coordinates of a chemical entity; and determining whether the chemical entity is expected to bind to the molecule or complex, wherein binding to the molecule or complex is indicative of potential modulation of the activity of a HCMV gB polypeptide.

[0265] In another aspect, the present invention provides a computer-assisted method for identifying or designing a potential modulator to a HCMV gB polypeptide, supplying a computer modeling application with a set of structure coordinates of a molecule or complex, the molecule or complex including at least a portion of a druggable region of a HCMV gB polypeptide; supplying the computer modeling application with a set of structure coordinates for a chemical entity; evaluating the potential binding interactions between the chemical entity and active site of the molecule or molecular complex; structurally modifying the chemical entity to yield a set of structure coordinates for a modified chemical entity, and determining whether the modified chemical entity is expected to bind to the molecule or complex, wherein binding to the molecule or complex is indicative of potential modulation of the HCMV gB polypeptide.

[0266] In one embodiment, a potential modulator can be obtained by screening a peptide or other compound or chemical library (Scott and Smith, Science, 249:386-390 (1990); Cwirla et al., Proc. Natl. Acad. Sci., 87:6378-6382 (1990); Devlin et al., Science, 249:404-406 (1990)). A potential modulator selected in this manner could then be systematically modified by computer modeling programs until one or more promising potential drugs are identified. Such analysis has been shown to be effective in the development of HIV protease modulators (Lam et al., Science 263:380-384 (1994); Wlodawer et al., Ann. Rev. Biochem. 62:543-585 (1993); Appelt, Perspectives in Drug Discovery and Design 1:23-48 (1993); Erickson, Perspectives in Drug Discovery and Design 1:109-128 (1993)). Alternatively, a potential modulator may be selected from a library of chemicals such as those that can be licensed from third parties, such as chemical and pharmaceutical companies. A third alternative is to synthesize the potential modulator de novo.

[0267] For example, in certain embodiments, the present invention provides a method for making a potential modulator for a HCMV gB polypeptide, the method including synthesizing a chemical entity or a molecule containing the chemical entity to yield a potential modulator of a HCMV gB polypeptide, the chemical entity having been identified during a computer-assisted process including supplying a computer modeling application with a set of structure coordinates of a molecule or complex, the molecule or complex including at least one druggable region from a HCMV gB polypeptide; supplying the computer modeling application with a set of structure coordinates of a chemical entity; and determining whether the chemical entity is expected to bind to the molecule or complex at the active site, e.g. druggable region, wherein binding to the molecule or complex is indicative of potential modulation. This method may further include the steps of evaluating the potential binding interactions between the chemical entity and the active site, e.g. druggable region, of the molecule or molecular complex and structurally modifying the chemical entity to yield a set of structure coordinates for a modified chemical entity, which steps may be repeated one or more times.

[0268] Once a potential modulator is identified, it can then be tested in any standard assay for the macromolecule depending of course on the macromolecule, including in high throughput assays. Further refinements to the structure of the modulator will generally be necessary and can be made by the successive iterations of any and/or all of the steps provided by the particular screening assay, in particular further structural analysis by e.g., 15N NMR relaxation rate determinations or x-ray crystallography with the modulator bound to a HCMV gB polypeptide. These studies may be performed in conjunction with biochemical assays.

[0269] Once identified, a potential modulator may be used as a model structure, and analogs to the compound can be obtained. The analogs are then screened for their ability to bind to a HCMV gB polypeptide. An analog of the potential modulator might be chosen as a modulator when it binds to a HCMV gB polypeptide with a higher binding affinity than the predecessor modulator.

[0270] In a related approach, iterative drug design is used to identify modulators of a target protein. Iterative drug design is a method for optimizing associations between a protein and a modulator by determining and evaluating the three-dimensional structures of successive sets of protein/modulator complexes. In iterative drug design, crystals of a series of protein/modulator complexes are obtained and then the three-dimensional structures of each complex is solved. Such an approach provides insight into the association between the proteins and modulators of each complex. For example, this approach may be accomplished by selecting modulators with modulatory activity, obtaining crystals of this new protein/modulator complex, solving the three-dimensional structure of the complex, and comparing the associations between the new protein/modulator complex and previously solved protein/modulator complexes. By observing how changes in the modulator affected the protein/modulator associations, these associations may be optimized.

[0271] In addition to designing and/or identifying a chemical entity to associate with a druggable region, as described above, the same techniques and methods may be used to design and/or identify chemical entities that either associate, or do not associate, with affinity regions, selectivity regions or undesired regions of protein targets. By such methods, selectivity for one or a few targets, or alternatively for multiple targets, from the same species or from multiple species, can be achieved.

[0272] For example, a chemical entity may be designed and/or identified for which the binding energy for one druggable region, e.g., an affinity region or selectivity region, is more favorable than that for another region, e.g., an undesired region, by about 20%, 30%, 50% to about 60% or more. It may be the case that the difference is observed between (a) more than two regions, (b) between different regions (selectivity, affinity or undesirable) from the same target, (c) between regions of different targets, (d) between regions of homologs from different species, or (e) between other combinations. Alternatively, the comparison may be made by reference to the Kd, usually the apparent Kd, of said chemical entity with the two or more regions in question.

[0273] In another aspect, prospective modulators are screened for binding to two nearby druggable regions on a target protein. For example, a modulator that binds a first region of a target polypeptide does not bind a second nearby region. Binding to the second region can be determined by monitoring changes in a different set of amide chemical shifts in either the original screen or a second screen conducted in the presence of a modulator (or potential modulator) for the first region. From an analysis of the chemical shift changes, the approximate location of a potential modulator for the second region is identified. Optimization of the second modulator for binding to the region is then carried out by screening structurally related compounds (e.g., analogs as described above). When modulators for the first region and the second region are identified, their location and orientation in the ternary complex can be determined experimentally. On the basis of this structural information, a linked compound, e.g., a consolidated modulator, is synthesized in which the modulator for the first region and the modulator for the second region are linked. In certain embodiments, the two modulators are covalently linked to form a consolidated modulator. This consolidated modulator may be tested to determine if it has a higher binding affinity for the target than either of the two individual modulators. A consolidated modulator is selected as a modulator when it has a higher binding affinity for the target than either of the two modulators. Larger consolidated modulators can be constructed in an analogous manner, e.g., linking three modulators which bind to three nearby regions on the target to form a multilinked consolidated modulator that has an even higher affinity for the target than the linked modulator. In this example, it is assumed that is desirable to have the modulator bind to all the druggable regions. However, it may be the case that binding to certain of the druggable regions is not desirable, so that the same techniques may be used to identify modulators and consolidated modulators that show increased specificity based on binding to at least one but not all druggable regions of a target.

[0274] The present invention provides a number of methods that use drug design as described above. For example, in one aspect, the present invention contemplates a method for designing a candidate therapeutic for screening for modulators of a HCMV gB polypeptide, the method comprising: (a) determining the three dimensional structure of a crystallized HCMV gB polypeptide or a fragment thereof; and (b) designing a candidate therapeutic based on the three dimensional structure of the crystallized polypeptide or fragment.

### (ii) Modulator Libraries

[0275] The synthesis and screening of combinatorial libraries is a validated strategy for the identification and study of organic molecules of interest. According to the present invention, the synthesis of libraries containing molecules that bind, interact with, or modulate the activity/function of a subject druggable region may be performed using established combinatorial methods for solution phase, solid phase, or a combination of solution phase and solid phase synthesis techniques. The synthesis of combinatorial libraries is well known in the art and has been reviewed (see, e.g., “Combinatorial Chemistry”, Chemical and Engineering News, Feb. 24, 1997, p. 43; Thompson et al., Chem. Rev. (1996) 96:555). Many libraries are commercially available. One of ordinary skill in the art will realize that the choice of method for any particular embodiment will depend upon the specific number of molecules to be synthesized, the specific reaction chemistry, and the availability of specific instrumentation, such as robotic instrumentation for the preparation and analysis of the inventive libraries. In certain embodiments, the reactions to be performed to generate the libraries are selected for their ability to proceed in high yield, and in a stereoselective and regioselective fashion, if applicable.

[0276] In one aspect of the present invention, the inventive libraries are generated using a solution phase technique. Traditional advantages of solution phase techniques for the synthesis of combinatorial libraries include the availability of a much wider range of reactions, and the relative ease with which products may be characterized, and ready identification of library members, as discussed below. For example, in certain embodiments, for the generation of a solution phase combinatorial library, a parallel synthesis technique is utilized, in which all of the products are assembled separately in their own reaction vessels. In a particular parallel synthesis procedure, a microtitre plate containing n rows and m columns of tiny wells which are capable of holding a few milliliters of the solvent in which the reaction will occur, is utilized. It is possible to then use n variants of reactant A, such as a ligand, and m variants of reactant B, such as a second ligand, to obtain n×m variants, in n×m wells. One of ordinary skill in the art will realize that this particular procedure is most useful when smaller libraries are desired, and the specific wells may provide a ready means to identify the library members in a particular well.

[0277] In other embodiments of the present invention, a solid phase synthesis technique is utilized. Solid phase techniques allow reactions to be driven to completion because excess reagents may be utilized and the unreacted reagent washed away. Solid phase synthesis also allows the use a technique called “split and pool”, in addition to the parallel synthesis technique, developed by Furka. See, e.g., Furka et al., Abstr. 14th Int. Congr. Biochem., (Prague, Czechoslovakia) (1988) 5:47; Furka et al., Int. J. Pept. Protein Res. (1991) 37:487; Sebestyen et al., Bioorg. Med. Chem. Lett. (1993) 3:413. In this technique, a mixture of related molecules may be made in the same reaction vessel, thus substantially reducing the number of containers required for the synthesis of very large libraries, such as those containing as many as or more than one million library members. As an example, the solid support with the starting material attached may be divided into n vessels, where n represents the number species of reagent A to be reacted with the such starting material. After reaction, the contents from n vessels are combined and then split into m vessels, where m represents the number of species of reagent B to be reacted with the now modified starting materials. This procedure is repeated until the desired number of reagents is reacted with the starting materials to yield the inventive library.

[0278] The use of solid phase techniques in the present invention may also include the use of a specific encoding technique. Specific encoding techniques have been reviewed by Czarnik in Current Opinion in Chemical Biology (1997) 1:60. One of ordinary skill in the art will also realize that if smaller solid phase libraries are generated in specific reaction wells, such as 96 well plates, or on plastic pins, the reaction history of these library members may also be identified by their spatial coordinates in the particular plate, and thus are spatially encoded. In other embodiments, an encoding technique involves the use of a particular “identifying agent” attached to the solid support, which enables the determination of the structure of a specific library member without reference to its spatial coordinates. Examples of such encoding techniques include, but are not limited to, spatial encoding techniques, graphical encoding techniques, including the “tea bag” method, chemical encoding methods, and spectrophotometric encoding methods. One of ordinary skill in the art will realize that the particular encoding method to be used in the present invention must be selected based upon the number of library members desired, and the reaction chemistry employed.

[0279] In certain embodiments, molecules of the present invention may be prepared using solid support chemistry known in the art. For example, polypeptides having up to twenty amino acids or more may be generated using standard solid phase technology on commercially available equipment (such as Advanced Chemtech multiple organic synthesizers). In certain embodiments, a starting material or later reactant may be attached to the solid phase, through a linking unit, or directly, and subsequently used in the synthesis of desired molecules. The choice of linkage will depend upon the reactivity of the molecules and the solid support units and the stability of these linkages. Direct attachment to the solid support via a linker molecule may be useful if it is desired not to detach the library member from the solid support. For example, for direct on-bead analysis of biological activity, a stronger interaction between the library member and the solid support may be desirable. Alternatively, the use of a linking reagent may be useful if more facile cleavage of the inventive library members from the solid support is desired.

[0280] In regard to automation of the present subject methods, a variety of instrumentation may be used to allow for the facile and efficient preparation of chemical libraries of the present invention, and methods of assaying members of such libraries. In general, automation, as used in reference to the synthesis and preparation of the subject chemical libraries, involves having instrumentation complete one or more of the operative steps that must be repeated a multitude of times because a library instead of a single molecule is being prepared. Examples of automation include, without limitation, having instrumentation complete the addition of reagents, the mixing and reaction of them, filtering of reaction mixtures, washing of solids with solvents, removal and addition of solvents, and the like. Automation may be applied to any steps in a reaction scheme, including those to prepare, purify and assay molecules for use in the compositions of the present invention.

[0281] There is a range of automation possible. For example, the synthesis of the subject libraries may be wholly automated or only partially automated. If wholly automated, the subject library may be prepared by the instrumentation without any human intervention after initiating the synthetic process, other than refilling reagent bottles or monitoring or programming the instrumentation as necessary. Although synthesis of a subject library may be wholly automated, it may be necessary for there to be human intervention for purification, identification, or the like of the library members.

[0282] In contrast, partial automation of the synthesis of a subject library involves some robotic assistance with the physical steps of the reaction schema that gives rise to the library, such as mixing, stirring, filtering and the like, but still requires some human intervention other than just refilling reagent bottles or monitoring or programming the instrumentation. This type of robotic automation is distinguished from assistance provided by convention organic synthetic and biological techniques because in partial automation, instrumentation still completes one or more of the steps of any schema that is required to be completed a multitude of times because a library of molecules is being prepared.

[0283] In certain embodiments, the subject library may be prepared in multiple reaction vessels (e.g., microtitre plates and the like), and the identity of particular members of the library may be determined by the location of each vessel. In other embodiments, the subject library may be synthesized in solution, and by the use of deconvolution techniques, the identity of particular members may be determined.

[0284] In one aspect of the invention, the subject screening method may be carried out utilizing immobilized libraries. In certain embodiments, the immobilized library will have the ability to bind to a microorganism as described above. The choice of a suitable support will be routine to the skilled artisan. Important criteria may include that the reactivity of the support not interfere with the reactions required to prepare the library. Insoluble polymeric supports include functionalized polymers based on polystyrene, polystyrene/divinylbenzene copolymers, and the like, including any of the particles described herein. It will be understood that the polymeric support may be coated, grafted or otherwise bonded to other solid supports.

[0285] In another embodiment, the polymeric support may be provided by reversibly soluble polymers. Such polymeric supports include functionalized polymers based on polyvinyl alcohol or polyethylene glycol (PEG). A soluble support may be made insoluble (e.g., may be made to precipitate) by addition of a suitable inert nonsolvent. One advantage of reactions performed using soluble polymeric supports is that reactions in solution may be more rapid, higher yielding, and more complete than reactions that are performed on insoluble polymeric supports.

[0286] Once the synthesis of either a desired solution phase or solid support bound template has been completed, the template is then available for further reaction to yield the desired solution phase or solid support bound structure. The use of solid support bound templates enables the use of more rapid split and pool techniques.

[0287] Characterization of the library members may be performed using standard analytical techniques, such as mass spectrometry, Nuclear Magnetic Resonance Spectroscopy, including 195 Pt and 1H NMR, chromatography (e.g., liquid etc.) and infra-red spectroscopy. One of ordinary skill in the art will realize that the selection of a particular analytical technique will depend upon whether the inventive library members are in the solution phase or on the solid phase. In addition to such characterization, the library member may be synthesized separately to allow for more ready identification.

(iii) In Vitro Assays

[0288] Any form of HCMV gB polypeptide, e.g. a full-length polypeptide or a fragment thereof comprising the target druggable region, may be used to assess the activity of candidate therapeutics in in vitro assays. In one embodiment of such an assay, agents are identified which modulate the biological activity of a druggable region, the protein-protein interaction of interest or formation of a protein complex involving a subject druggable region. In another embodiment of such an assay, agents are identified which bind or interact with subject druggable region. In certain embodiments, the test agent is a small organic molecule. The candidate agents may be selected, for example, from the following classes of compounds: detergents, proteins, peptides, peptidomimetics, antibodies, small molecules, cytokines, or hormones. In some embodiments, the candidate therapeutic (also known as a “candidate agent” or “test agent”) may be in a library of compounds. These libraries may be generated using combinatorial synthetic methods as described above. In certain embodiments of the present invention, the ability of said candidate therapeutics to bind a target druggable region may be evaluated by an in vitro assay. In either embodiment, discussed in the next section, the binding assay may also be in vivo.

[0289] The invention also provides a method of screening multiple compounds to identify those which modulate the action of peptides or polypeptides of the invention, or polynucleotides encoding the same. The method of screening may involve high-throughput techniques. For example, to screen for modulators, a synthetic reaction mix, a coellular compartment, such as a membrane, cell envelope or cell wall, or a preparation of any thereof, a whole cell or tissue, or even a whole organism, comprising a HCMV gB polypeptide and a labeled substrate or ligand of such polypeptide is incubated in the absence or the presence of a candidate therapeutic that may be a modulator of a HCMV gB polypeptide. The ability of the candidate therapeutic to modulate a HCMV gB polypeptide is reflected in decreased binding of the labeled ligand or decreased production of product from such substrate. Detection of the rate or level of production of product from substrate may be enhanced by using a reporter system. Reporter systems that may be useful in this regard include but are not limited to colorimetric labeled substrate converted into product, a reporter gene that is responsive to changes in a nucleic acid of the invention or polypeptide activity, and binding assays known in the art. For example, in one embodiment, the modulator or inhibitor peptide is conjugated to FITC and the affinity of the FITC-labelled peptide for the target binding pocket is measured using a fluorescence polarization assay. The specificity of the modulator or inhibitor for the target binding pocket may be shown by using a biotynilated derivative of the modulator or inhibitor using the “pull down” method described in Schmidt et al. ((2010) PLoS Pathog 6(4): e1000851). To detect the modulator or inhibitor association with virions, incubate biotinyl-labelled modulator or inhibitor with virion and add streptavidin resin to detect by immunoblotting. To further confirm modulator or inhibitor association with virions, use pyrene labelled virions in the presence of modulator or inhibitor and check excimer intensity. In a preferred embodiment, fluorescence polarization and FRET are methods of detecting binding of the domain V peptides and inhibition of that binding. In a further embodiment, surface plasmon resonance is used to screen for binding of the modulator or inhibitor to the druggable region.

[0290] Another example of an assay for a modulator of a HCMV gB polypeptide is a competitive assay that combines a HCMV gB peptide or polypeptide and a potential modulator with molecules that bind to a HCMV gB polypeptide, recombinant molecules that bind to a HCMV gB polypeptide, natural substrates or ligands, or substrate or ligand mimetics, under appropriate conditions for a competitive inhibition assay. Peptides or polypeptides of the invention can be labeled, such as by radioactivity or a colorimetric compound, such that the number of molecules of a HCMV gB peptide or polypeptide bound to a binding molecule or converted to product can be determined accurately to assess the effectiveness of the potential modulator. In one aspect, the HCMV gB peptides are fragments of SEQ ID NO:1 having residues M648-K700 (SEQ ID NO: 260), M648-V697 (SEQ ID NO: 261), S647-V697 (SEQ ID NO: 262), S647-V663 (SEQ ID NO: 263), 1653-V697 (SEQ ID NO: 264), 1653-Q692 (SEQ ID NO: 265), 1653-L680 (SEQ ID NO: 266), 1653-S675 (SEQ ID NO: 267), 1653-Y667 (SEQ ID NO: 268), R662-V697 (SEQ ID NO: 269), R662-Q692 (SEQ ID NO: 270), R662-L680 (SEQ ID NO: 271), R662-S675 (SEQ ID NO: 272), L664-F678 (SEQ ID NO: 273), S668-V697 (SEQ ID NO: 274), S668-Q692 (SEQ ID NO: 275), S668-V677 (SEQ ID NO: 276), D679-V697 (SEQ ID NO: 277), L680-V697 (SEQ ID NO: 278), L680-Q692 (SEQ ID NO: 279), and R693-K700 (SEQ ID NO: 280).

[0291] A number of methods for identifying a molecule which modulates the activity of a polypeptide are known in the art. For example, in one such method, a HCMV gB polypeptide is contacted with a test compound, and the activity of the HCMV gB polypeptide in the presence of the test compound is determined, wherein a change in the activity of the HCMV gB polypeptide is indicative that the test compound modulates the activity of the HCMV gB polypeptide. In certain instances, the test compound agonizes the activity of the HCMV gB polypeptide, and in other instances, the test compound antagonizes the activity of the HCMV gB polypeptide.

[0292] In another example, a compound which modulates HCMV gB polypeptide dependent growth or infectivity of HCMV may be identified by (a) contacting a HCMV gB polypeptide with a test compound; and (b) determining the activity of the polypeptide in the presence of the test compound, wherein a change in the activity of the polypeptide is indicative that the test compound may modulate the growth or infectivity of HCMV.

[0293] In certain of the subject assays, to evaluate the results using the subject compositions, comparisons may be made to known molecules, such as one with a known binding affinity for the target. For example, a known molecule and a new molecule of interest may be assayed. The result of the assay for the subject complex will be of a type and of a magnitude that may be compared to result for the known molecule. To the extent that the subject complex exhibits a type of response in the assay that is quantifiably different from that of the known molecule then the result for such complex in the assay would be deemed a positive or negative result. In certain assays, the magnitude of the response may be expressed as a percentage response with the known molecule result, e.g. 100% of the known result if they are the same.

[0294] As those skilled in the art will understand, based on the present description, binding assays may be used to detect agents that bind a polypeptide. Cell-free assays may be used to identify molecules that are capable of interacting with a polypeptide. In a preferred embodiment, cell-free assays for identifying such molecules are comprised essentially of a reaction mixture containing a target and a test molecule or a library of test molecules. A test molecule may be, e.g., a derivative of a known binding partner of the target, e.g., a biologically inactive peptide, or a small molecule. Agents to be tested for their ability to bind may be produced, for example, by bacteria, yeast or other organisms (e.g. natural products), produced chemically (e.g. small molecules, including peptidomimetics), or produced recombinantly. In certain embodiments, the test molecule is selected from the group consisting of lipids, carbohydrates, peptides, peptidomimetics, peptide-nucleic acids (PNAs), proteins (including antibodies), small molecules, natural products, aptamers and oligonucleotides. In other embodiments of the invention, the binding assays are not cell-free. In a preferred embodiment, such assays for identifying molecules that bind a target comprise a reaction mixture containing a target microorganism and a test molecule or a library of test molecules.

[0295] In many candidate screening programs which test libraries of molecules and natural extracts, high throughput assays are desirable in order to maximize the number of molecules surveyed in a given period of time. Assays of the present invention which are performed in cell-free systems, such as may be derived with purified or semi-purified proteins or with lysates, are often preferred as “primary” screens in that they may be generated to permit rapid development and relatively easy detection of binding between a target and a test molecule. Moreover, the effects of cellular toxicity and/or bioavailability of the test molecule may be generally ignored in the in vitro system, the assay instead being focused primarily on the ability of the molecule to bind the target. Accordingly, potential binding molecules may be detected in a cell-free assay generated by constitution of functional interactions of interest in a cell lysate. In an alternate format, the assay may be derived as a reconstituted protein mixture which, as described below, offers a number of benefits over lysate-based assays.

[0296] In one aspect, the present invention provides assays that may be used to screen for molecules that bind HCMV gB polypeptide druggable regions. In an exemplary binding assay, the molecule of interest is contacted with a mixture generated from target cell surface polypeptides. Detection and quantification of expected binding to a target polypeptide provides a means for determining the molecule's efficacy at binding the target. The efficacy of the molecule may be assessed by generating dose response curves from data obtained using various concentrations of the test molecule. Moreover, a control assay may also be performed to provide a baseline for comparison. In the control assay, the formation of complexes is quantitated in the absence of the test molecule.

[0297] Complex formation between a molecule and a target HCMV gB polypeptide or microorganism containing a HCMV gB polypeptide may be detected by a variety of techniques, many of which are effectively described above. For instance, modulation in the formation of complexes may be quantitated using, for example, detectably labeled proteins (e.g. radiolabeled, fluorescently labeled, or enzymatically labeled), by immunoassay, or by chromatographic detection.

[0298] Accordingly, one exemplary screening assay of the present invention includes the steps of contacting a HCMV gB polypeptide or functional fragment thereof with a test molecule or library of test molecules and detecting the formation of complexes. For detection purposes, for example, the molecule may be labeled with a specific marker and the test molecule or library of test molecules labeled with a different marker. Interaction of a test molecule with a polypeptide or fragment thereof may then be detected by determining the level of the two labels after an incubation step and a washing step. The presence of two labels after the washing step is indicative of an interaction. Such an assay may also be modified to work with a whole target cell.

[0299] An interaction between a HCMV gB polypeptide target and a molecule may also be identified by using real-time BIA (Biomolecular Interaction Analysis, Pharmacia Biosensor AB) which detects surface plasmon resonance (SPR), an optical phenomenon. Detection depends on changes in the mass concentration of macromolecules at the biospecific interface, and does not require any labeling of interactants. In one embodiment, a library of test molecules may be immobilized on a sensor surface, e.g., which forms one wall of a micro-flow cell. A solution containing the target is then flowed continuously over the sensor surface. A change in the resonance angle as shown on a signal recording, indicates that an interaction has occurred. This technique is further described, e.g., in BIAtechnology Handbook by Pharmacia.

[0300] In a preferred embodiment, it will be desirable to immobilize the target to facilitate separation of complexes from uncomplexed forms, as well as to accommodate automation of the assay. Binding of polypeptide to a test molecule may be accomplished in any vessel suitable for containing the reactants. Examples include microtitre plates, test tubes, and micro-centrifuge tubes. In one embodiment, a fusion protein may be provided which adds a domain that allows the target to be bound to a matrix. For example, glutathione-S-transferase/polypeptide (GST/polypeptide) fusion proteins may be adsorbed onto glutathione sepharose beads (Sigma Chemical, St. Louis, Mo.) or glutathione derivatized microtitre plates, which are then combined with a labeled test molecule (e.g., S35 labeled, P33 labeled, and the like, and the mixture incubated under conditions conducive to complex formation, e.g. at physiological conditions for salt and pH, though slightly more stringent conditions may be desired. Following incubation, the beads are washed to remove any unbound label, and the matrix immobilized and radiolabel determined directly (e.g. beads placed in scintillant), or in the supernatant after the complexes are subsequently dissociated. Alternatively, the complexes may be dissociated from the matrix, separated by SDS-PAGE, and the level of polypeptide or binding partner found in the bead fraction quantitated from the gel using standard electrophoretic techniques such as described in the appended examples. The above techniques could also be modified in which the test molecule is immobilized, and the labeled target is incubated with the immobilized test molecules. In one embodiment of the invention, the test molecules are immobilized, optionally via a linker, to a particle of the invention, e.g. to create the ultimate composition.

[0301] Other techniques for immobilizing targets or molecules on matrices may be used in the subject assays. For instance, a target or molecule may be immobilized utilizing conjugation of biotin and streptavidin. For instance, biotinylated polypeptide molecules may be prepared from biotin-NHS (N-hydroxy-succinimide) using techniques well known in the art (e.g., biotinylation kit, Pierce Chemicals, Rockford, III.), and immobilized in the wells of streptavidin-coated 96 well plates (Pierce Chemical). Alternatively, antibodies reactive with a target or molecule may be derivatized to the wells of the plate, and the target or molecule trapped in the wells by antibody conjugation. As above, preparations of test molecules are incubated in the polypeptide presenting wells of the plate, and the amount of complex trapped in the well may be quantitated. Exemplary methods for detecting such complexes, in addition to those described above for the GST-immobilized complexes, include immunodetection of complexes using antibodies reactive with the complex, or which are reactive with one of the complex components; as well as enzyme-linked assays which rely on detecting an enzymatic activity associated with a target or molecule, either intrinsic or extrinsic activity. In an instance of the latter, the enzyme may be chemically conjugated or provided as a fusion protein with the target or molecule. To illustrate, a target polypeptide may be chemically cross-linked or genetically fused with horseradish peroxidase, and the amount of polypeptide trapped in a complex with a molecule may be assessed with a chromogenic substrate of the enzyme, e.g. 3,3′-diamino-benzadine tetrahydrochloride or 4-chloro-1-napthol. Likewise, a fusion protein comprising the polypeptide and glutathione-S-transferase may be provided, and complex formation quantitated by detecting the GST activity using 1-chloro-2,4-dinitrobenzene (Habig et al (1974) J Biol Chem 249:7130).

[0302] For processes that rely on immunodetection for quantitating one of the components trapped in a complex, antibodies against a component, such as anti-polypeptide antibodies, may be used. Alternatively, the component to be detected in the complex may be “epitope tagged” in the form of a fusion protein which includes, in addition to the polypeptide sequence, a second polypeptide for which antibodies are readily available (e.g. from commercial sources). For instance, the GST fusion proteins, described above may also be used for quantification of binding using antibodies against the GST moiety. Other useful epitope tags include myc-epitopes (e.g., see Ellison et al. (1991) J Biol Chem 266:21150-21157) which includes a 10-residue sequence from c-myc, as well as the pFLAG system (International Biotechnologies, Inc.) or the pEZZ-protein A system (Pharmacia, NJ).

[0303] In certain in vitro embodiments of the present assay, the solution containing the target comprises a reconstituted protein mixture of at least semi-purified proteins. By semi-purified, it is meant that the components utilized in the reconstituted mixture have been previously separated from other cellular or viral proteins. For instance, in contrast to cell lysates, a target protein is present in the mixture to at least 50% purity relative to all other proteins in the mixture, and more preferably are present at 90-95% purity. In certain embodiments of the subject method, the reconstituted protein mixture is derived by mixing highly purified proteins such that the reconstituted mixture substantially lacks other proteins (such as of cellular or viral origin) which might interfere with or otherwise alter the ability to measure binding activity. In one embodiment, the use of reconstituted protein mixtures allows more careful control of the target:molecule interaction conditions.

[0304] In still other embodiments of the present invention, variations of viral fusion or viral infectivity assays may be utilized in order to determine the ability of a test molecule to prevent a virus expressing HCMV gB polypeptide from binding to, fusing with, or infecting cells. If fusion, binding, or infecting is prevented, then the molecule or composition may be useful as a therapeutic agent.

[0305] All of the screening methods may be accomplished by using a variety of assay formats. In light of the present disclosure, those not expressly described herein will nevertheless be known and comprehended by one of ordinary skill in the art. Assay formats which approximate such conditions as formation of protein complexes or protein-nucleic acid complexes, and enzymatic activity may be generated in many different forms, as those skilled in the art will appreciate based on the present description and include but are not limited to assays based on cell-free systems, e.g. purified proteins or cell lysates, as well as cell-based assays which utilize intact cells. Assaying binding resulting from a given target:molecule interaction may be accomplished in any vessel suitable for containing the reactants. Examples include microtitre plates, test tubes, and micro-centrifuge tubes. Any of the assays may be provided in kit format and may be automated. Many of the following particularized assays rely on general principles, such as blockage or prevention of fusion, that may apply to other particular assays.

### (iv) In Vivo Assays

[0306] Animal models of viral infection and/or disease may be used as an in vivo assay for evaluating the effectiveness of a potential drug target in treating or preventing HCMV infection.

[0307] A number of suitable animal models are described briefly below, however, these models are only examples and modifications, or completely different animal models, may be used in accord with the methods of the invention. Animal models may be developed by methods known in the art, for example, by infecting an animal with HCMV, or by genetically engineering an animal to be predisposed to such infection (see, e.g., Maidji, E. et al. Impaired Surfactant Production by Alveolar Epithelial Cells in a SCID-hu Lung Mouse Model of Congenital Human Cytomegalovirus Infection. J Virol. 2012 December; 86(23): 12795-12805; Crawford, L. B. et al. Humanized Mouse Models of Human Cytomegalovirus Infection. Curr Opin Virol. 2015 August; 13: 86-92).

[0308] Further, viral infectivity assays may be used as in vivo assays to assess the effectiveness of a potential drug target in treating or preventing HCMV infection. For example, such as competitive, asymmetric reverse transcriptase-mediated PCR (RT-PCR) assays and flow cytometric assays that measure viral antigen, and plaque assays, may be used to assess the effectiveness of a potential drug target.

[0309] Still further, cell-cell fusion assays may be used as in vivo assays to assess the effectiveness of a potential drug target in treating or preventing HCMV infection.

[0310] A variety of other in vivo models are available and may be used when appropriate for specific pathogens or specific test agents.

[0311] It is also relevant to note that the species of animal used for an infection model, and the specific genetic make-up of that animal, may contribute to the effective evaluation of the effects of a particular test agent. For example, immuno-incompetent animals may, in some instances, be preferable to immuno-competent animals. For example, the action of a competent immune system may, to some degree, mask the effects of the test agent as compared to a similar infection in an immuno-incompetent animal. In addition, many opportunistic infections, in fact, occur in immuno-compromised patients, so modeling an infection in a similar immunological environment is appropriate.

### E. Pharmaceutical Compositions

[0312] Pharmaceutical compositions of this invention include any modulator identified according to the present invention, or a pharmaceutically acceptable salt thereof, and a pharmaceutically acceptable carrier, adjuvant, or vehicle. The term “pharmaceutically acceptable carrier” refers to a carrier(s) that is “acceptable” in the sense of being compatible with the other ingredients of a composition and not deleterious to the recipient thereof.

[0313] Methods of making and using such pharmaceutical compositions are also included in the invention. The pharmaceutical compositions of the invention can be administered orally, parenterally, by inhalation spray, topically, rectally, nasally, buccally, vaginally, or via an implanted reservoir. The term parenteral as used herein includes subcutaneous, intracutaneous, intravenous, intramuscular, intra articular, intrasynovial, intrasternal, intrathecal, intralesional, and intracranial injection or infusion techniques.

[0314] Dosage levels of between about 0.01 and about 100 mg/kg body weight per day, preferably between about 0.5 and about 75 mg/kg body weight per day of the modulators described herein are useful for the prevention and treatment of disease and conditions caused by HCMV infection, including diseases and conditions mediated by pathogenic species of origin for the polypeptides of the invention. The amount of active ingredient that may be combined with the carrier materials to produce a single dosage form will vary depending upon the host treated and the particular mode of administration. A typical preparation will contain from about 5% to about 95% active compound (w/w). Alternatively, such preparations contain from about 20% to about 80% active compound.

### F. Kits

[0315] The present invention provides kits for treating or preventing HCMV infections. For example, a kit may comprise compositions comprising compounds identified herein as modulators of HCMV gB polypeptide. The compositions may be pharmaceutical compositions comprising a pharmaceutically acceptable excipient. In other embodiments involving kits, this invention contemplates a kit including compositions of the present invention, and optionally instructions for their use. Kit components may be packaged for either manual or partially or wholly automated practice of the foregoing methods. Such kits may have a variety of uses, including, for example, imaging, diagnosis, therapy, and other applications.

### G. Preparation of the Polypeptide

[0316] The polypeptides described herein may be prepared by routine methods known in the art, such as by expression in a recombinant host system using a suitable vector. Suitable recombinant host cells include, for example, insect cells, mammalian cells, avian cells, bacteria, and yeast cells. Examples of suitable insect cells include, for example, Sf9 cells, Sf21 cells, Tn5 cells, Schneider S2 cells, and HIGH FIVE cells (a clonal isolate derived from the parental Trichoplusia ni BTI-TN-5B1-4 cell line). Examples of suitable mammalian cells include Chinese hamster ovary (CHO) cells, human embryonic kidney cells (HEK293 or Expi 293 cells, typically transformed by sheared adenovirus type 5 DNA), NIH-3T3 cells, 293-T cells, Vero cells, and Hela cells. Suitable avian cells include, for example, chicken embryonic stem cells (e.g., EBx.RTM, cells), chicken embryonic fibroblasts, chicken embryonic germ cells, quail fibroblasts (e.g. ELL-O), and duck cells. Suitable insect cell expression systems, such as baculovirus-vectored systems, are known to those of skill in the art. Materials and methods for baculovirus/insect cell expression systems are commercially available in kit form from. Avian cell expression systems are also known to those of skill in the art. Similarly, bacterial and mammalian cell expression systems are also known in the art.

[0317] A number of suitable vectors for expression of recombinant proteins in insect or mammalian cells are well-known and conventional in the art. Suitable vectors can contain a number of components, including, but not limited to one or more of the following: an origin of replication; a selectable marker gene; one or more expression control elements, such as a transcriptional control element (e.g., a promoter, an enhancer, a terminator), and/or one or more translation signals; and a signal sequence or leader sequence for targeting to the secretory pathway in a selected host cell (e.g., of mammalian origin or from a heterologous mammalian or non-mammalian species). For example, for expression in insect cells a suitable baculovirus expression vector, such as PFASTBAC, is used to produce recombinant baculovirus particles. The baculovirus particles are amplified and used to infect insect cells to express recombinant protein. For expression in mammalian cells, a vector that will drive expression of the construct in the desired mammalian host cell (e.g., Chinese hamster ovary cells) is used.

[0318] The polypeptide can be purified using any suitable methods. For example, methods for purifying a polypeptide by immunoaffinity chromatography are known in the art. Suitable methods for purifying desired polypeptides including precipitation and various types of chromatography, such as hydrophobic interaction, ion exchange, affinity, chelating and size exclusion are known in the art. Suitable purification schemes can be created using two or more of these or other suitable methods. If desired, the polypeptide may include a “tag” that facilitates purification, such as an epitope tag or a histidine tag. Such tagged polypeptides can be purified, for example from conditioned media, by chelating chromatography or affinity chromatography.

1. Nucleic Acids Encoding polypeptides

[0319] In another aspect, the invention relates to nucleic acid molecules that encode a polypeptide described herein. These nucleic acid molecules include DNA, cDNA, and RNA sequences. The nucleic acid molecule can be incorporated into a vector, such as an expression vector.

[0320] In some embodiments, the nucleic acid includes a self-replicating RNA molecule. In some embodiments, the nucleic acid includes a modified RNA molecule. In another aspect, the invention relates to a composition including a nucleic acid according to any one of the embodiments described herein.

### 2. Compound-Stabilized Polypeptide

[0321] The inventors discovered a polypeptide stabilized in a prefusion conformation that can be identified by, for example, the binding of a bis(aryl)thiourea compound to an HCMV gB as described in WO2021/260510 which is hereby incorporated by reference in its entirety. Bis(aryl)thiourea compounds, as exemplified by structures 1a,b (Formula I), are highly potent and specific inhibitors of CMV. In one aspect, the HCMV gB polypeptide is capable of binding to a bis(aryl)thiourea compound. In preferred embodiments, the compound does not bind to a postfusion conformation of the HCMV gB polypeptide.

[chemical structure]

In a preferred embodiment, the compound is a bis(aryl)thiourea thioziole analog thereof. Most preferably, in some embodiments, the compound is N-{4-[({(1S)-1-[3,5-bis(trifluoromethyl)phenyl]ethyl}carbamothioyl)amino]phenyl}-1,3-thiazole-4-carboxamide, having the following structure:

[chemical structure]

In another embodiment, the compound has the following structure:

[chemical structure]

[0322] In several embodiments, the polypeptide includes an HCMV gB prefusion epitope, which is not present in a native HCMV gB postfusion conformation.

[0323] In some embodiments, at least about 90% of the polypeptides (such as at least about 91%, 92%, 93%, 94%, 95%, 96%, 97%, 98%, 99% or 99.9% of the polypeptides in the homogeneous population are bound by a bis(aryl)thiourea compound (e.g., such as a thiazole analog of bis(aryl)thiourea compounds, more preferably N-{4-[({(1S)-1-[3,5-bis(trifluoromethyl)phenyl]ethyl}carbamothioyl) amino]phenyl}-1,3-thiazole-4-carboxamide).

[0324] In some embodiments, the polypeptide that can bind to the bis(aryl)thiourea compound does not have a postfusion conformation. Rather, the polypeptide has a prefusion conformation, such as an HCMV gB prefusion conformation.

[0325] In another embodiment, the polypeptide can be at least 80% isolated, at least 90%, 95%, 98%, 99%, or preferably 99.9% isolated from HCMV gB polypeptides that are not specifically bound by a bis(aryl)thiourea compound.

### 3. Compositions Including a Polypeptide and Methods of Use Thereof

[0326] The invention relates to compositions and methods of using the modulators described herein. For example, the modulator of the invention can be delivered directly as a component of an immunogenic composition. Alternatively, if the modulator comprises amino acids, the nucleic acids that encode the amino acid sequence of the invention can be administered to produce the peptide, polypeptide or immunogenic fragment in vivo. Certain preferred embodiments, such as protein formulations, recombinant nucleic acids (e.g., DNA, RNA, self-replicating RNA, or any variation thereof) and viral vectors (e.g., live, single-round, non-replicative assembled virions, or otherwise virus-like particles, or alphavirus VRP) that contain sequences encoding polypeptides are further described herein and may be included in the composition.

[0327] In one aspect, the invention provides an immunogenic composition comprising the modulator described herein. The immunogenic composition can include additional CMV proteins, such as gO, gH, gL, pUL128, pUL130, PUL131, pp 65, an immunogenic fragment thereof, or a combination thereof. For example, the modulator can be combined with CMV pentameric complex comprising: gH or a pentamer-forming fragment thereof, gL or a pentamer-forming fragment thereof, pUL128 or a pentamer-forming fragment thereof, pUL130 or a pentamer-forming fragment thereof, and pUL131 or a pentamer-forming fragment thereof. The modulator of the invention can also be combined with CMV trimeric complex comprising: gH or a trimer-forming fragment thereof, gL or a trimer-forming fragment thereof, and gO or a trimer-forming fragment thereof.

[0328] In another aspect, the invention relates to a composition including a polynucleotide that may elicit an immune response in a mammal. The polynucleotide encodes at least one polypeptide of interest, e.g., an antigen. Antigens disclosed herein may be wild type (i.e., derived from the infectious agent) or preferably modified (e.g., engineered, designed or artificial). The nucleic acid molecules described herein, specifically polynucleotides, in some embodiments, encode one or more peptides or polypeptides of interest. Such peptides or polypeptides may serve as an antigen or antigenic molecule. The term “nucleic acid” includes any compound that includes a polymer of nucleotides. These polymers are referred to as “polynucleotides.” Exemplary nucleic acids or polynucleotides of the invention include, but are not limited to, ribonucleic acids (RNAs), including mRNA, and deoxyribonucleic acids (DNAs).

[0329] In some embodiments, the composition includes DNA encoding a polypeptide or fragment thereof described herein. In some embodiments, the composition includes RNA encoding a polypeptide or fragment thereof described herein. In some embodiments, the composition includes an mRNA polynucleotide encoding a polypeptide or fragment thereof described herein. Such compositions may produce the appropriate protein conformation upon translation.

[0330] In one aspect, the invention relates to a composition that includes at least one polynucleotide encoding a polypeptide including at least one amino acid mutation relative to the amino acid sequence of the wild-type HCMV gB.

[0331] In one aspect, the invention relates to a composition that includes at least one DNA polynucleotide encoding a polypeptide including at least one amino acid mutation relative to the amino acid sequence of the wild-type HCMV gB.

[0332] In one aspect, the invention relates to a composition that includes at least one RNA polynucleotide encoding a polypeptide including at least one amino acid mutation relative to the amino acid sequence of the wild-type HCMV gB.

[0333] In some embodiments, the invention relates to a composition that includes at least one polynucleotide encoding at least one hCMV gB polypeptide or an immunogenic fragment or epitope thereof.

[0334] In some embodiments, the composition includes at least one polynucleotide encoding two or more antigenic polypeptides or an immunogenic fragment or epitope thereof. In some embodiments, the composition includes two or more polynucleotides encoding two or more antigenic polypeptides or immunogenic fragments or epitopes thereof. The one or more antigenic polypeptides may be encoded on a single polynucleotide or may be encoded individually on multiple (e.g., two or more) polynucleotides.

[0335] In another aspect, the invention relates to a composition that includes (a) a polynucleotide encoding a polypeptide including at least one introduced amino acid mutation relative to the amino acid sequence of the wild-type HCMV glycoprotein B (gB); and (b) a polynucleotide encoding an additional polypeptide.

[0336] In another aspect, the invention relates to a composition that includes (a) a polynucleotide encoding a polypeptide including at least one introduced amino acid mutation relative to the amino acid sequence of the wild-type HCMV glycoprotein B (gB); and (b) a polynucleotide encoding an additional polypeptide, preferably an HCMV antigenic polypeptide. The additional polypeptide may be selected from HCMV gH, gL, gB, gO, gN, and gM and an immunogenic fragment or epitope thereof. In some embodiments, the additional polypeptide is HCMV pp 65. In some embodiments, the additional polypeptide may be selected from gH, gL, gO, gM, gN, UL128, UL130, and UL131A, and fragments thereof. In some embodiments, the additional polypeptide is HCMV gH polypeptide. In some embodiments, the additional polypeptide is an HCMV gL polypeptide. In some embodiments, the additional polypeptide is an HCMV gB polypeptide. In some embodiments, the additional polypeptide is an HCMV gO polypeptide. In some embodiments, the additional polypeptide is an HCMV gN polypeptide. In some embodiments, the additional polypeptide is an HCMV gM polypeptide. In some embodiments, the additional polypeptide is a variant gH polypeptide, a variant gL polypeptide, or a variant gB polypeptide. In some embodiments, the variant HCMV gH, gL, or gB polypeptide is a truncated polypeptide lacking one or more of the following domain sequences: (1) the hydrophobic membrane proximal domain, (2) the transmembrane domain, and (3) the cytoplasmic domain. In some embodiments, the truncated HCMV gH, gL, or gB polypeptide lacks the hydrophobic membrane proximal domain, the transmembrane domain, and the cytoplasmic domain. In some embodiments, the truncated HCMV gH, gL, or gB polypeptide includes only the ectodomain sequence. In some embodiments, an antigenic polypeptide is an HCMV protein selected from UL83, UL123, UL128, UL130 and UL131A or an immunogenic fragment or epitope thereof. In some embodiments, the antigenic polypeptide is an HCMV UL83 polypeptide. In some embodiments, the antigenic polypeptide is an HCMV UL123 polypeptide. In some embodiments, the antigenic polypeptide is an HCMV UL128 polypeptide. In some embodiments, the antigenic polypeptide is an HCMV UL130 polypeptide. In some embodiments, the antigenic polypeptide is an HCMV UL131 polypeptide.

[0337] In another aspect, the invention relates to a composition that includes (a) a polynucleotide encoding a polypeptide including at least one introduced amino acid mutation relative to the amino acid sequence of the wild-type HCMV glycoprotein B (gB); and (b) a polynucleotide encoding an additional polypeptide having any one of the amino acid sequences SEQ ID NOS: 211-223. In another aspect, the invention relates to a composition that includes (a) a polynucleotide encoding a polypeptide including at least one introduced amino acid mutation relative to the amino acid sequence of the wild-type HCMV glycoprotein B (gB); and (b) a polynucleotide having any one of the sequences selected from SEQ ID NOs: 141-210. In another aspect, the invention relates to a composition that includes (a) a polynucleotide encoding a polypeptide including at least one introduced amino acid mutation relative to the amino acid sequence of the wild-type HCMV glycoprotein B (gB); and (b) an additional polypeptide having any one of the amino acid sequences selected from SEQ ID NOs: 211-223. In some embodiments, the polynucleotide encoding the additional polypeptide includes at least one nucleic acid sequence selected from any of SEQ ID NOs: 224-254. In some embodiments, the polynucleotide encoding the additional polypeptide includes at least one nucleic acid sequence selected from any of SEQ ID NOS: 141-147. In some embodiments, the polynucleotide encoding the additional polypeptide has at least one sequence selected from any of SEQ ID NOs: 220-223.

[0338] In some embodiments, the antigenic polypeptide includes two or more HCMV proteins, fragments, or epitopes thereof. In some embodiments, the antigenic polypeptide includes two or more glycoproteins, fragments, or epitopes thereof. In some embodiments, the antigenic polypeptide includes at least one HCMV polypeptide, fragment or epitope thereof and at least one other HCMV protein, fragment or epitope thereof. In some embodiments, the two or more HCMV polypeptides are encoded by a single RNA polynucleotide. In some embodiments, the two or more HCMV polypeptides are encoded by two or more RNA polynucleotides, for example, each HCMV polypeptide is encoded by a separate RNA polynucleotide. In some embodiments, the two or more HCMV polypeptides can be any combination of HCMV gH, gL, gB, gO, gN, and gM polypeptides or immunogenic fragments or epitopes thereof. In some embodiments, the two or more glycoproteins includes pp 65 or immunogenic fragments or epitopes thereof; and any combination of HCMV gH, gL, gB, gO, gN, and gM polypeptides or immunogenic fragments or epitopes thereof. In some embodiments, the two or more glycoproteins can be any combination of HCMV gB and one or more HCMV polypeptides selected from gH, gL, gO, gN, and gM polypeptides or immunogenic fragments or epitopes thereof. In some embodiments, the two or more glycoproteins can be any combination of HCMV gH and one or more HCMV polypeptides selected from gL, gO, gN, and gM polypeptides or immunogenic fragments or epitopes thereof. In some embodiments, the two or more glycoproteins can be any combination of HCMV gL and one or more HCMV polypeptides selected from gB, gH, gO, gN, and gM polypeptides or immunogenic fragments or epitopes thereof. In some embodiments, the two or more HCMV polypeptides are gB and gH. In some embodiments, the two or more HCMV polypeptides are gB and gL. In some embodiments, the two or more HCMV polypeptides are gH and gL. In some embodiments, the two or more HCMV polypeptides are gB, gL, and gH. In some embodiments, the two or more HCMV proteins can be any combination of HCMV UL83, UL123, UL128, UL130, and UL131A polypeptides or immunogenic fragments or epitopes thereof. In some embodiments, the two or more HCMV polypeptides are UL123 and UL130. In some embodiments, the two or more HCMV polypeptides are UL123 and 131 A. In some embodiments, the two or more HCMV polypeptides are UL130 and 131 A. In some embodiments, the two or more HCMV polypeptides are UL128, UL130 and 131 A. In some embodiments, the two or more HCMV proteins can be any combination of HCMV gB, gH, gL, gO, gM, gN, UL83, UL123, UL128, UL130, and UL131A polypeptides or immunogenic fragments or epitopes thereof. In some embodiments, the two or more glycoproteins can be any combination of HCMV gH and one or more HCMV polypeptides selected from gL, UL128, UL130, and UL131A polypeptides or immunogenic fragments or epitopes thereof. In some embodiments, the two or more glycoproteins can be any combination of HCMV gL and one or more HCMV polypeptides selected from gH, UL128, UL130, and UL131A polypeptides or immunogenic fragments or epitopes thereof. In some embodiments, the two or more HCMV polypeptides are gL, gH, UL128, UL130 and 131 A. In any of these embodiments in which the composition includes two or more HCMV proteins, the HCMV gH may be a variant gH, such as any of the variant HCMV gH glycoproteins disclosed herein, for example, any of the variant HCMV gH disclosed herein. In any of these embodiments in which the composition includes two or more HCMV proteins, the HCMV gB may be a variant gB, such as any of the variant HCMV gB glycoproteins disclosed herein, for example, any of the variant HCMV gB disclosed herein. In any of these embodiments in which the composition includes two or more HCMV gL proteins, the HCMV gL may be a variant gL, such as any of the variant HCMV gL glycoproteins disclosed herein, for example, any of the variant HCMV gL disclosed herein.

[0339] In certain embodiments in which the composition includes two or more RNA polynucleotides encoding two or more HCMV antigenic polypeptides or an immunogenic fragment or epitope thereof (either encoded by a single RNA polynucleotide or encoded by two or more RNA polynucleotides, for example, each protein encoded by a separate RNA polynucleotide), the two or more HCMV proteins are a variant gB, for example, any of the variant gB polypeptides disclosed herein, and an HCMV protein selected from gH, gL, gO, gM, gN, UL128, UL130, and UL131 polypeptides or immunogenic fragments or epitopes thereof. In some embodiments, the two or more HCMV proteins are a variant gH, for example, any of the variant gH polypeptides disclosed herein, and an HCMV protein selected from gH, gL, gO, gM, gN, UL128, UL130, and UL131A polypeptides or immunogenic fragments or epitopes thereof. In some embodiments, the two or more HCMV proteins are a variant gH, for example, any of the variant gH polypeptides disclosed herein, and an HCMV protein selected from gH, gL, gO, gM, gN, UL128, UL130, and UL131 polypeptides or immunogenic fragments or epitopes thereof. In some embodiments in which the variant HCMV proteins are variant HCMV gB, variant HCMV gL, and variant HCMV gH, the variant HCMV polypeptide is a truncated polypeptide selected from the following truncated polypeptides: lacks the hydrophobic membrane proximal domain; lacks the transmembrane domain; lacks the cytoplasmic domain; lacks two or more of the hydrophobic membrane proximal, transmembrane, and cytoplasmic domains; and includes only the ectodomain. In some embodiments, the composition includes multimeric RNA polynucleotides encoding at least one HCMV antigenic polypeptide or an immunogenic fragment or epitope thereof. In some embodiments, the composition includes at least one RNA polynucleotide encoding at least one HCMV antigenic polypeptide or an immunogenic fragment or epitope thereof, wherein the 5′UTR of the RNA polynucleotide includes a patterned UTR. In some embodiments, the patterned UTR has a repeating or alternating pattern, such as ABABAB or AABBAABBAABB or ABCABCABC or variants thereof repeated once, twice, or more than 3 times. In these patterns, each letter, A, B, or C represent a different UTR at the nucleotide level. In some embodiments, the 5′ UTR of the RNA polynucleotide (e.g., a first nucleic acid) has regions of complementarity with a UTR of another RNA polynucleotide (a second nucleic acid). For example, UTR nucleotide sequences of two polynucleotides sought to be joined (e.g., in a multimeric molecule) can be modified to include a region of complementarity such that the two UTRs hybridize to form a multimeric molecule. In some embodiments, the 5′ UTR of an RNA polynucleotide encoding an HCMV antigenic polypeptide is modified to allow the formation of a multimeric sequence. In some embodiments, the 5′ UTR of an RNA polynucleotide encoding an HCMV protein selected from UL128, UL130, UL131 is modified to allow the formation of a multimeric sequence. In some embodiments, the 5′ UTR of an RNA polynucleotide encoding an HCMV polypeptide is modified to allow the formation of a multimeric sequence. In some embodiments, the 5′ UTR of an RNA polynucleotide encoding an HCMV polypeptide selected from gH, gL, gB, gO, gM, and gN is modified to allow the formation of a multimeric sequence. In any of these embodiments, the multimer may be a dimer, a trimer, pentamer, hexamer, heptamer, octamer nonamer, or decamer. Thus, in some embodiments, the 5′ UTR of an RNA polynucleotide encoding an HCMV protein selected from gH, gL, gB, gO, gM, gN, UL128, UL130, and UL131 is modified to allow the formation of a dimer. In some embodiments, the 5′ UTR of an RNA polynucleotide encoding an HCMV protein selected from gH, gL, gB, gO, gM, gN, UL128, UL130, and UL131A is modified to allow the formation of a trimer. In some embodiments, the 5′ UTR of an RNA polynucleotide encoding an HCMV protein selected from gH, gL, gB, gO, gM, gN, UL128, UL130, and UL131 is modified to allow the formation of a pentamer. In some embodiments, the composition includes at least one RNA polynucleotide having a single open reading frame encoding two or more (for example, two, three, four, five, or more) HCMV antigenic polypeptides or an immunogenic fragment or epitope thereof. In some embodiments, the composition includes at least one RNA polynucleotide having more than one open reading frame, for example, two, three, four, five or more open reading frames encoding two, three, four, five or more HCMV antigenic polypeptides. In either of these embodiments, the at least one RNA polynucleotide may encode two or more HCMV antigenic polypeptides selected from gH, gB, gL, gO, gM, gN, UL83, UL123, UL128, UL130, UL131A, and fragments or epitopes thereof. In some embodiments, the at least one RNA polynucleotide encodes UL83 and UL123. In some embodiments, the at least one RNA polynucleotide encodes gH and gL. In some embodiments, the at least one RNA polynucleotide encodes UL128, UL130, and UL131. In some embodiments, the at least one RNA polynucleotide encodes gH, gL, UL128, UL130, and UL131. In some embodiments, in which the at least one RNA polynucleotide has a single open reading frame encoding two or more (for example, two, three, four, five, or more) HCMV antigenic polypeptides, the RNA polynucleotide further comprises additional sequence, for example, a linker sequence or a sequence that aids in the processing of the HCMV RNA transcripts or polypeptides, for example a cleavage site sequence. In some embodiments, the additional sequence may be a protease sequence, such as a furin sequence. In some embodiments, the additional sequence may be self-cleaving 2A peptide, such as a P2A, E2A, F2A, and T2A sequence. In some embodiments, the linker sequences and cleavage site sequences are interspersed between the sequences encoding HCMV polypeptides.

[0340] In some embodiments, at least one RNA polynucleotide includes any nucleic acid sequence selected from any one of nucleic acid sequences disclosed herein, or homologs thereof having at least 80% (e.g., 85%, 90%, 95%, 98%, 99%) identity with a nucleic acid sequence disclosed herein. In some embodiments, the open reading frame is encoded is codon-optimized. Some embodiments include a composition that includes at least one RNA polynucleotide encoding at least one HCMV antigenic polypeptide or an immunogenic fragment thereof and at least one 5′ terminal cap. In some embodiments, a 5′ terminal cap is 7 mG(5′)ppp(5′)NImpNp.

[0341] In some embodiments, the at least one polynucleotide includes a nucleic acid sequence selected from any one of SEQ ID NOs: 141-210. In some embodiments, the at least one polynucleotide encodes a polypeptide having at least 90% identity to any one of the amino acid sequences of SEQ ID NOs: 211-223. In some preferred embodiments, the composition does not include a polypeptide having the amino acid sequence SEQ ID NO: 216. In some preferred embodiments, the composition does not include a polynucleotide encoding the amino acid sequence SEQ ID NO: 216. In some preferred embodiments, the composition does not include a polynucleotide having the sequence SEQ ID NO: 152.

[0342] In some embodiments, the composition includes at least one polynucleotide, wherein the at least one polynucleotide has at least one chemical modification. In some embodiments, the at least one polynucleotide further includes a second chemical modification. Preferably, the polynucleotide is RAN. In some embodiments, the at least one polynucleotide having at least one chemical modification has a 5′ terminal cap. In some embodiments, the at least one chemical modification is selected from pseudouridine, N1-methylpseudouridine, N1-ethylpseudouridine, N1-ethylpseudouridine, 2-thiouridine, 4′-thiouridine, 5-methylcytosine, 2-thio-I-methyl-1-deaza-pseudouri dine, 2-thio-I-methyl-pseudouridine, 2-thio-5-aza-uridine, 2-thio-dihydropseudouridine, 2-thio-dihydrouridine, 2-thio-pseudouridine, 4-methoxy-2-thio-pseudouridine, 4-methoxy-pseudouridine, 4-thio-I-methyl-pseudouridine, 4-thio-pseudouridine, 5-aza-uridine, dihydropseudouridine, 5-methoxyuridine and 2′-O-methyl uridine. In some embodiments, the composition includes at least one polynucleotide, wherein at least 80% (e.g., 85%, 90%, 95%, 98%, 99%, 100%) of the uracil in the open reading frame has a chemical modification, optionally wherein the composition is formulated in a lipid nanoparticle. In some embodiments, 100% of the uracil in the open reading frame has a chemical modification. In some embodiments, a chemical modification is in the 5-position of the uracil. In some embodiments, a chemical modification is a N1-methyl pseudouridine.

[0343] In some embodiments, the additional polypeptides or immunogenic fragments encoded by the polynucleotide (e.g., in an mRNA composition) are selected from gB, gH, gL, gO, gM, gN, UL83, UL123, UL128, UL130, UL131A, pp 65 and IE1 antigens.

[0344] In some embodiments, a first composition and a second composition are administered to the mammal. In some embodiments, a first composition includes a polynucleotide encoding a polypeptide including at least one introduced amino acid mutation relative to the amino acid sequence of the wild-type HCMV gB; and a second composition includes a polynucleotide encoding HCMV pp 65 or an antigenic fragment or epitope thereof. In some embodiments, a first composition includes a polynucleotide encoding a polypeptide including at least one introduced amino acid mutation relative to the amino acid sequence of the wild-type HCMV gB; and a second composition includes a polynucleotide encoding at least one polynucleotide encoding an additional polypeptide selected from HCMV gH, gL, UL128, UL130, and UL131, or antigenic fragments or epitopes thereof.

[0345] In another aspect, the invention relates to methods of inducing an immune response in a mammal, including administering to the mammal a composition in an amount effective to induce an immune response, wherein the composition includes a polynucleotide encoding a modulator of the wild-type HCMV gB.

[0346] In some embodiments, the immune response includes a T cell response or a B cell response. In some embodiments, the immune response includes a T cell response and a B cell response. In some embodiments, the method involves a single administration of the composition. In some embodiments, a method further includes administering to the subject a booster dose of the composition. The composition including a polynucleotide disclosed herein may be formulated in an effective amount to produce an antigen specific immune response in a mammal.

[0347] The immunogenic composition may include an adjuvant. Exemplary adjuvants to enhance effectiveness of the composition include: (1) aluminum salts (alum), such as aluminum hydroxide, aluminum phosphate, aluminum sulfate, etc.; (2) oil-in-water emulsion formulations (with or without other specific adjuvants such as muramyl peptides (see below) or bacterial cell wall components), such as for example (a) MF59 (PCT Publ. No. WO 90/14837), containing 5% Squalene, 0.5% TWEEN 80, and 0.5% Span 85 formulated into submicron particles using a microfluidizer, (b) SAF, containing 10% Squalane, 0.4% Tween 80, 5% pluronic-blocked polymer L121, and thr-MDP either microfluidized into a submicron emulsion or vortexed to generate a larger particle size emulsion, and (c) RIBI™ adjuvant system (RAS), (Ribi Immunochem, Hamilton, Mont.) containing 2% Squalene, 0.2% Tween 80, and one or more bacterial cell wall components from the group consisting of monophosphorylipid A (MPL), trehalose dimycolate (TDM), and cell wall skeleton (CWS), preferably MPL+CWS (DETOX™); (3) saponin adjuvants, such as QS-21, STIMULON™ (Cambridge Bioscience, Worcester, Mass.), which may be used or particles generated therefrom such as ISCOMs (immunostimulating complexes), ALFQ; (4) Complete Freunds Adjuvant (CFA) and Incomplete Freunds Adjuvant (IFA); (5) cytokines, such as interleukins (IL-1, IL-2, etc.), macrophage colony stimulating factor (M-CSF), tumor necrosis factor (TNF), etc.; and (6) other substances that act as adjuvants to enhance the effectiveness of the composition. In a preferred embodiment, the adjuvant is a saponin adjuvant, namely comprising QS-21. In some embodiments, the composition does not include an adjuvant. In some embodiments, the composition further includes a lipid nanoparticle. In some embodiments, the composition is formulated in a nanoparticle. In some embodiments, the composition further includes a cationic or polycationic compounds, including protamine or other cationic peptides or proteins, such as poly-L-lysine (PLL).

[0348] Each of the immunogenic compositions discussed herein may be used alone or in combination with one or more other antigens, the latter either from the same viral pathogen or from another pathogenic source or sources. These compositions may be used for prophylactic (to prevent infection) or therapeutic (to treat disease after infection) purposes.

[0349] In one embodiment, the composition may include a “pharmaceutically acceptable carrier,” which includes any carrier that does not itself induce the production of antibodies harmful to the individual receiving the composition. Suitable carriers are typically large, slowly metabolized macromolecules such as proteins, polysaccharides, polylactic acids, polyglycolic acids, polymeric amino acids, amino acid copolymers, lipid aggregates (such as oil droplets or liposomes), and inactive virus particles. Such carriers are well known to those of ordinary skill in the art. Additionally, these carriers may function as adjuvants. Furthermore, the antigen may be conjugated to a bacterial toxoid, such as a toxoid from diphtheria, tetanus, cholera, H. pylori, and etc. pathogens.

[0350] In one embodiment, the composition includes a diluent, such as water, saline, glycerol, ethanol, etc. Additionally, auxiliary substances, such as wetting or emulsifying agents, pH buffering substances, and the like, may be present in such vehicles.

[0351] The compositions described herein may include an immunologically effective amount of the polypeptide or polynucleotide, as well as any other of the above-mentioned components, as needed. By “immunologically effective amount,” it is meant that the administration of that amount to an individual, either in a single dose or as part of a series, is effective for eliciting an immune response. The immune response elicited may be sufficient, for example, for treatment and/or prevention and/or reduction in incidence of illness, infection or disease. This amount varies depending upon the health and physical condition of the individual to be treated, the taxonomic group of individual to be treated (e.g., nonhuman primate, primate, etc.), the capacity of the individual's immune system to synthesize antibodies, the degree of protection desired, the formulation of the vaccine, the treating doctor's assessment of the medical situation, and other relevant factors. It is expected that the amount will fall in a relatively broad range that can be determined through routine trials.

[0352] The composition may be administered parenterally, e.g., by injection, either subcutaneously or intramuscularly. In some embodiments, the composition is administered to the mammal by intradermal or intramuscular injection. Additional formulations suitable for other modes of administration include oral and pulmonary formulations, nasal formulations, suppositories, and transdermal applications. Oral formulations may be preferred for certain viral proteins. Dosage treatment may be a single dose schedule or a multiple dose schedule. The immunogenic composition may be administered in conjunction with other immunoregulatory agents.

[0353] In another aspect, the invention provides a method of eliciting an immune response against cytomegalovirus, comprising administering to a subject in need thereof an immunologically effective amount of the polypeptide and/or an immunogenic composition described herein, which comprises the proteins, DNA molecules, RNA molecules (e.g., self-replicating RNA molecules), or VRPs as described above. In certain embodiments, the immune response comprises the production of neutralizing antibodies against CMV.

[0354] The immune response can comprise a humoral immune response, a cell-mediated immune response, or both. In some embodiments an immune response is induced against each delivered CMV protein. A cell-mediated immune response can comprise a Helper T-cell (Th) response, a CD8+ cytotoxic T-cell (CTL) response, or both. In some embodiments the immune response comprises a humoral immune response, and the antibodies are neutralizing antibodies.

[0355] Neutralizing antibodies block viral infection of cells. CMV infects epithelial cells and also fibroblast cells. In some embodiments the immune response reduces or prevents infection of both cell types. Neutralizing antibody responses can be complement-dependent or complement-independent. In some embodiments the neutralizing antibody response is complement-independent. In some embodiments the neutralizing antibody response is cross-neutralizing; i.e., an antibody generated against an administered composition neutralizes a CMV virus of a strain other than the strain used in the composition.

[0356] The polypeptide and/or immunogenic composition described herein may also elicit an effective immune response to reduce the likelihood of a CMV infection of a non-infected mammal, or to reduce symptoms in an infected mammal, e.g., reduce the number of outbreaks, CMV shedding, and risk of spreading the virus to other mammals.

[0357] In one aspect, the invention relates to a method for reducing CMV viral shedding in a mammal. In some embodiments, the invention relates to a method for reducing CMV viral shedding in urine in a mammal. In some embodiments, the invention relates to a method for reducing CMV viral shedding in saliva in a mammal. In another aspect, the invention relates to a method for reducing CMV viral titers in a mammal. In one aspect, the invention relates to a method for reducing CMV nucleic acids in serum in a mammal. The term “viral shedding” is used herein according to its plain ordinary meaning in medicine and virology and refers to the production and release of virus from an infected cell. In some embodiments, the virus is released from a cell of a mammal. In some embodiments, virus is released into the environment from an infected mammal. In some embodiments the virus is released from a cell within a mammal.

[0358] In one aspect, the invention relates to a method for reducing CMV viral shedding in a mammal. The method includes administering the modified CMV gB polypeptide and/or immunogenic composition described herein to the mammal that is infected with or is at risk of a CMV infection. In one embodiment, the reduction in CMV viral shedding in a mammal is as compared to the viral shedding in mammals that were not administered the modified CMV gB. In another embodiment, the reduction in CMV viral shedding in a mammal is as compared to the viral shedding following an administration of a CMV pentamer alone or following an administration of a CMV pentamer in the absence of the polypeptide.

[0359] In some embodiments, the mammal is a human. In some embodiments, the human is a child, such as an infant. In some other embodiments, the human is female, including an adolescent female, a female of childbearing age, a female who is planning pregnancy, a pregnant female, and females who recently gave birth. In some embodiments, the human is a transplant patient.

[0360] In one embodiment, the challenge cytomegalovirus strain is a human CMV strain. In one embodiment, the challenge cytomegalovirus strain is homologous to the CMV strain from which the polypeptide is derived. In another embodiment, the challenge cytomegalovirus strain is homologous to the CMV strain VR1814. In another embodiment, the challenge cytomegalovirus strain is homologous to the CMV strain Towne.

[0361] In one embodiment, the challenge cytomegalovirus strain is a human CMV strain that is heterologous to the CMV strain from which the modified CMV gB polypeptide is derived. In another embodiment, the challenge cytomegalovirus strain is a human CMV strain that is heterologous to the VR1814 CMV strain. In another embodiment, the challenge cytomegalovirus strain is the VR1814 CMV strain. In another embodiment, the challenge cytomegalovirus strain is a human CMV strain that is heterologous to the CMV strain Towne. In another embodiment, the challenge cytomegalovirus strain is the CMV strain Towne.

[0362] In another embodiment, the challenge cytomegalovirus strain is a rhesus CMV strain homologous to the macacine herpesvirus 3 isolate 21252 CMV strain. In another embodiment, the challenge cytomegalovirus strain is the macacine herpesvirus 3 isolate 21252 CMV strain.

[0363] A useful measure of antibody potency in the art is “50% neutralization titer.” Another useful measure of antibody potency is any one of the following: a “60% neutralization titer”; a “70% neutralization titer”; a “80% neutralization titer”; and a “90% neutralization titer.” To determine, for example, a 50% neutralizing titer, serum from immunized animals is diluted to assess how dilute serum can be yet retain the ability to block entry of 50% of infectious viruses into cells. For example, a titer of 700 means that serum retained the ability to neutralize 50% of infectious virus after being diluted 700-fold. Thus, higher titers indicate more potent neutralizing antibody responses. In some embodiments, this titer is in a range having a lower limit of about 200, about 400, about 600, about 800, about 1000, about 1500, about 2000, about 2500, about 3000, about 3500, about 4000, about 4500, about 5000, about 5500, about 6000, about 6500, or about 7000. The 50%, 60%, 70%, 80%, or 90% neutralization titer range can have an upper limit of about 400, about 600, about 800, about 1000, about 1500, about 2000, about 2500, about 3000, about 3500, about 4000, about 4500, about 5000, about 5500, about 6000, about 6500, about 7000, about 8000, about 9000, about 10000, about 1 1000, about 12000, about 13000, about 14000, about 15000, about 16000, about 17000, about 18000, about 19000, about 20000, about 21000, about 22000, about 23000, about 24000, about 25000, about 26000, about 27000, about 28000, about 29000, or about 30000. For example, the 50% neutralization titer can be about 3000 to about 6500. “About” means plus or minus 10% of the recited value. Neutralization titer can be measured as described in the specific examples, below.

[0364] An immune response can be stimulated by administering proteins, DNA molecules, RNA molecules (e.g., self-replicating RNA molecules or nucleoside modified RNA molecules), or VRPs to an individual, typically a mammal, including a human. In some embodiments the immune response induced is a protective immune response, i.e., the response reduces the risk or severity of or clinical consequences of a CMV infection. Stimulating a protective immune response is particularly desirable in some populations particularly at risk from CMV infection and disease. For example, at-risk populations include solid organ transplant (SOT) patients, bone marrow transplant patients, and hematopoietic stem cell transplant (HSCT) patients. VRPs can be administered to a transplant donor pre-transplant, or a transplant recipient pre- and/or post-transplant. Because vertical transmission from mother to child is a common source of infecting infants, administering VRPs to a woman who is pregnant or can become pregnant is particularly useful.

[0365] Any suitable route of administration can be used. For example, a composition can be administered intramuscularly, intraperitoneally, subcutaneously, or transdermally. Some embodiments will be administered through an intra-mucosal route such as intra-orally, intra-nasally, intra-vaginally, and intra-rectally. Compositions can be administered according to any suitable schedule.

[0366] Also provided herein is a method of inhibiting cytomegalovirus entry into a cell, comprising contacting the cell with the composition described herein.

[0367] In one aspect, the invention relates to compositions that include a modulator described above. In another aspect, the invention relates to compositions that include a nucleic acid molecule or vector encoding such modulator. In a further aspect, the invention relates to compositions that include a modulator described above and a nucleic acid molecule or vector encoding such modulator.

[0368] In some embodiments, the composition is an immunogenic composition capable of eliciting an immune response against CMV in a subject. In some particular embodiments, the immunogenic composition is a pharmaceutical composition, which includes a modulator provided by the present disclosure and a pharmaceutically acceptable carrier. In still other embodiments, the pharmaceutical composition is a vaccine.

[0369] In some embodiments, a composition, such as an immunogenic composition or a vaccine, includes two or more different modulators described above. The two or more different modulators may include the same introduced amino acid mutations but may be derived from gB from different HCMV strains or subtypes. In another embodiment, the two or more different modulators may include amino acid mutations, as compared to a native HCMV gB, that differ from one another.

[0370] In preferred embodiments, the modulator is soluble in aqueous solution. In some embodiments, the modulator is soluble in a solution that lacks detergent.

### 4. Antibodies and Diagnostic Uses

[0371] The modulators described above may be used to produce antibodies, both polyclonal and monoclonal. If polyclonal antibodies are desired, a selected mammal (e.g., mouse, rabbit, goat, guinea pig, horse, etc.) is immunized with an immunogenic modulator. Serum from the immunized animal is collected and treated according to known procedures. If serum containing polyclonal antibodies to a CMV epitope contains antibodies to other antigens, the polyclonal antibodies can be purified by immunoaffinity chromatography. Techniques for producing and processing polyclonal antisera are known in the art.

[0372] Monoclonal antibodies directed against CMV epitopes can also be readily produced by one skilled in the art. The general methodology for making monoclonal antibodies by hybridomas is known. Immortal antibody-producing cell lines can be created by cell fusion, and also by other techniques such as direct transformation of B lymphocytes with oncogenic DNA, or transfection with Epstein-Barr virus. Panels of monoclonal antibodies produced against CMV epitopes can be screened for various properties; i.e., for isotype, epitope affinity, etc.

[0373] Antibodies, both monoclonal and polyclonal, which are directed against CMV epitopes are particularly useful in diagnosis, and those which are neutralizing are useful in passive immunotherapy. Monoclonal antibodies, in particular, may be used to raise anti-idiotype antibodies.

[0374] Both the modulators which react immunologically with serum containing CMV antibodies, and the antibodies raised against these modulators, may be useful in immunoassays to detect the presence of CMV antibodies, or the presence of the virus, in biological samples, including for example, blood or serum samples. Design of the immunoassays is subject to a great deal of variation, and a variety of these are known in the art. For example, the immunoassay may utilize the polypeptide having the sequence set forth in any one of SEQ ID NOs: 2-43.

[0375] Alternatively, the immunoassay may use a combination of viral antigens derived from the polypeptides described herein. It may use, for example, a monoclonal antibody directed towards at least one polypeptide described herein, a combination of monoclonal antibodies directed towards the polypeptides described herein, monoclonal antibodies directed towards different viral antigens, polyclonal antibodies directed towards the polypeptides described herein, or polyclonal antibodies directed towards different viral antigens. Protocols may be based, for example, upon competition, or direct reaction, or may be sandwich type assays. Protocols may also, for example, use solid supports, or may be by immunoprecipitation. Most assays involve the use of labeled antibody or polypeptide; the labels may be, for example, fluorescent, chemiluminescent, radioactive, or dye molecules. Assays which amplify the signals from the probe are also known; examples of which are assays which utilize biotin and avidin, and enzyme-labeled and mediated immunoassays, such as ELISA assays.

[0376] Kits suitable for immunodiagnosis and containing the appropriate labeled reagents are constructed by packaging the appropriate materials, including the polypeptides of the invention containing CMV epitopes or antibodies directed against epitopes in suitable containers, along with the remaining reagents and materials required for the conduct of the assay, as well as a suitable set of assay instructions.

[0377] The polynucleotide probes can also be packaged into diagnostic kits. Diagnostic kits include the probe DNA, which may be labeled; alternatively, the probe DNA may be unlabeled and the ingredients for labeling may be included in the kit. The kit may also contain other suitably packaged reagents and materials needed for the particular hybridization protocol, for example, standards, as well as instructions for conducting the test.

[0378] Some embodiments of the present disclosure provide a HCMV vaccine that includes at least one ribonucleic acid (RNA) polynucleotide having an open reading frame encoding at least one HCMV antigenic polypeptide or an immunogenic fragment thereof and at least one 5′ terminal cap. In some embodiments, a 5′ terminal cap is 7 mG(5′)ppp(5′)NImpNp.

[0379] Some embodiments of the present disclosure provide a HCMV vaccine that includes at least one ribonucleic acid (RNA) polynucleotide having an open reading frame encoding at least one HCMV antigenic polypeptide or an immunogenic fragment thereof, wherein the at least one ribonucleic acid (RNA) polynucleotide has at least one chemical modification. In some embodiments, the at least one ribonucleic acid (RNA) polynucleotide further comprises a second chemical modification. In some embodiments, the at least one ribonucleic acid (RNA) polynucleotide having at least one chemical modification has a 5′ terminal cap. In some embodiments, the at least one chemical modification is selected from pseudouridine, N1-methylpseudouridine, N1-ethylpseudouridine, N1-ethylpseudouridine, 2-thiouridine, 4′-thiouridine, 5-methylcytosine, 2-thio-1-methyl-1-deaza-pseudouridine, 2-thio-1-methyl-pseudouridine, 2-thio-5-aza-uridine, 2-thio-dihydropseudouridine, 2-thio-dihydrouridine, 2-thio-pseudouridine, 4-methoxy-2-thio-pseudouridine, 4-methoxy-pseudouridine, 4-thio-1-methyl-pseudouridine, 4-thio-pseudouridine, 5-aza-uridine, dihydropseudouridine, 5-methoxyuridine and 2′-O-methyl uridine.

[0380] In some embodiments, the chemical modification is selected from the group consisting of pseudouridine, N1-methylpseudouridine, N1-ethylpseudouridine, 2-thiouridine, 4′-thiouridine, 5-methylcytosine, 2-thio-1-methyl-1-deaza-pseudouridine, 2-thio-1-methyl-pseudouridine, 2-thio-5-aza-uridine, 2-thio-dihydropseudouridine, 2-thio-dihydrouridine, 2-thio-pseudouridine, 4-methoxy-2-thio-pseudouridine, 4-methoxy-pseudouridine, 4-thio-1-methyl-pseudouridine, 4-thio-pseudouridine, 5-aza-uridine, dihydropseudouridine, 5-methoxyuridine, and 2′-O-methyl uridine.

[0381] Some embodiments of the present disclosure provide a HCMV vaccine that includes at least one ribonucleic acid (RNA) polynucleotide having an open reading frame encoding at least one HCMV antigenic polypeptide or an immunogenic fragment thereof, wherein at least 80% (e.g., 85%, 90%, 95%, 98%, 99%, 100%) of the uracil in the open reading frame have a chemical modification, optionally wherein the vaccine is formulated in a lipid nanoparticle. In some embodiments, 100% of the uracil in the open reading frame have a chemical modification. In some embodiments, a chemical modification is in the 5-position of the uracil. In some embodiments, a chemical modification is a N1-methyl pseudouridine.

[0382] Some embodiments of the present disclosure provide a HCMV vaccine that is formulated within a cationic lipid nanoparticle, also referred to herein as ionizable cationic lipid nanoparticles, ionizable lipid nanoparticles and lipid nanoparticles, which are used interchangeably. In some embodiments, the lipid nanoparticle comprises a cationic lipid, a PEG-modified lipid, a sterol and a non-cationic lipid. In some embodiments, the cationic lipid is an ionizable cationic lipid and the non-cationic lipid is a neutral lipid, and the sterol is a cholesterol. In some embodiments, the cationic lipid is selected from the group consisting of 2,2-dilinoleyl-4-dimethylaminoethyl-[1,3]-dioxolane (DLin-KC2-DMA), dilinoleyl-methyl-4-dimethylaminobutyrate (DLin-MC3-DMA), and di((Z)-non-2-en-1-yl) 9-((4-(dimethylamino)butanoyl)oxy)heptadecanedioate (L319). In some embodiments, the lipid nanoparticle has a molar ratio of about 20-60% cationic lipid, about 5-25% non-cationic lipid, about 25-55% sterol, and about 0.5-15% PEG-modified lipid. In some embodiments, the nanoparticle has a polydiversity value of less than 0.4. In some embodiments, the nanoparticle has a net neutral charge at a neutral pH. In some embodiments, the nanoparticle has a mean diameter of 50-200 nm.

[0383] In some embodiments, 80% of the uracil in the open reading frame have a chemical modification. In some embodiments, 100% of the uracil in the open reading frame have a chemical modification. In some embodiments, the chemical modification is in the 5-position of the uracil. In some embodiments, the chemical modification is N1-methylpseudouridine, N1-ethylpseudouridine. In some embodiments, the vaccine is formulated within a lipid nanoparticle. In some embodiments, the lipid nanoparticle comprises a cationic lipid, a PEG-modified lipid, a sterol and a non-cationic lipid. In some embodiments, the cationic lipid is an ionizable cationic lipid and the non-cationic lipid is a neutral lipid, and the sterol is a cholesterol. In some embodiments, the cationic lipid is selected from the group consisting of 2,2-dilinoleyl-4-dimethylaminoethyl-[1,3]-dioxolane (DLin-KC2-DMA), dilinoleyl-methyl-4-dimethylaminobutyrate (DLin-MC3-DMA), and di((Z)-non-2-en-1-yl) 9-((4-(dimethylamino)butanoyl)oxy)heptadecanedioate (L319).

[0384] Some embodiments of the present disclosure provide methods of inducing an antigen specific immune response in a subject, comprising administering to the subject a HCMV RNA vaccine in an amount effective to produce an antigen specific immune response. In some embodiments, an antigen specific immune response comprises a T cell response or a B cell response. In some embodiments, an antigen specific immune response comprises a T cell response and a B cell response. In some embodiments, a method of producing an antigen specific immune response involves a single administration of the vaccine. In some embodiments, a method further includes administering to the subject a booster dose of the vaccine. In some embodiments, a vaccine is administered to the subject by intradermal or intramuscular injection.

[0385] Also provided herein are HCMV RNA vaccines for use in a method of inducing an antigen specific immune response in a subject, the method comprising administering the vaccine to the subject in an amount effective to produce an antigen specific immune response.

[0386] Further provided herein are uses of HCMV RNA vaccines in the manufacture of a medicament for use in a method of inducing an antigen specific immune response in a subject, the method comprising administering the vaccine to the subject in an amount effective to produce an antigen specific immune response.

[0387] Further provided herein are methods of preventing or treating HCMV infection comprising administering to a subject the vaccine of the present disclosure. The HCMV vaccine disclosed herein may be formulated in an effective amount to produce an antigen specific immune response in a subject.

[0388] The term “polypeptide variant” refers to molecules which differ in their amino acid sequence from a native or reference sequence. The amino acid sequence variants may possess substitutions, deletions, and/or insertions at certain positions within the amino acid sequence, as compared to a native or reference sequence. Ordinarily, variants possess at least 50% identity to a native or reference sequence. In some embodiments, variants share at least 80%, or at least 90% identity with a native or reference sequence.

[0389] In some embodiments “variant mimics” are provided. As used herein, the term “variant mimic” is one which contains at least one amino acid that would mimic an activated sequence. For example, glutamate may serve as a mimic for phosphoro-threonine and/or phosphoro-serine. Alternatively, variant mimics may result in deactivation or in an inactivated product containing the mimic, for example, phenylalanine may act as an inactivating substitution for tyrosine; or alanine may act as an inactivating substitution for serine. “Orthologs” refers to genes in different species that evolved from a common ancestral gene by speciation. Normally, orthologs retain the same function in the course of evolution. Identification of orthologs is critical for reliable prediction of gene function in newly sequenced genomes. “Analogs” is meant to include polypeptide variants which differ by one or more amino acid alterations, for example, substitutions, additions or deletions of amino acid residues that still maintain one or more of the properties of the parent or starting polypeptide.

[0390] The present disclosure provides several types of compositions that are polynucleotide or polypeptide based, including variants and derivatives. These include, for example, substitutional, insertional, deletion and covalent variants and derivatives. The term “derivative” is used synonymously with the term “variant” but generally refers to a molecule that has been modified and/or changed in any way relative to a reference molecule or starting molecule.

[0391] As such, polynucleotides encoding peptides or polypeptides containing substitutions, insertions and/or additions, deletions and covalent modifications with respect to reference sequences, in particular the polypeptide sequences disclosed herein, are included within the scope of this disclosure. For example, sequence tags or amino acids, such as one or more lysines, can be added to peptide sequences (e.g., at the N-terminal or C-terminal ends). Sequence tags can be used for peptide detection, purification or localization. Lysines can be used to increase peptide solubility or to allow for biotinylation. Alternatively, amino acid residues located at the carboxy and amino terminal regions of the amino acid sequence of a peptide or protein may optionally be deleted providing for truncated sequences. Certain amino acids (e.g., C-terminal or N-terminal residues) may alternatively be deleted depending on the use of the sequence, as for example, expression of the sequence as part of a larger sequence which is soluble, or linked to a solid support. “Substitutional variants” when referring to polypeptides are those that have at least one amino acid residue in a native or starting sequence removed and a different amino acid inserted in its place at the same position. Substitutions may be single, where only one amino acid in the molecule has been substituted, or they may be multiple, where two or more amino acids have been substituted in the same molecule.

### EXAMPLES

[0392] The invention is further described by the following illustrative examples. The examples do not limit the invention in any way. They merely serve to clarify the invention.

### EXAMPLE 1: Isolation and Purification of Crosslinked and Native HCMV gB (Towne strain) with Fusion Inhibitor

[0393] During the sample preparation the HCMV fusion inhibitor (compound 28 described in Bloom et al., Bioorganic & Medicinal Chemistry Letters 14 (2004) 3401-3406; see also FIG. 5D) was added to each step during the virus concentration, processing, extraction and purification to inhibit conversion of gB to the postfusion form.

[0394] Following crosslinking of the proteins on the virion surface with bis(sulfosuccinimidyl) glutarate (BS²G) and extraction of gB from the virion with detergent, the SM5-1 His/Strep-tagged Fab (Potzsch et al., PLoS pathogens 7(8):e1002172, 2011) was added to assist in purification and identification of gB by electron cryomicroscopy. The Fab-gB complexes were purified by an affinity column.

[0395] These extracted and purified proteins were then analyzed by electron cryomicroscopy for the presence of prefusion gB and used to solve the structure of a prefusion form.

### EXAMPLE 2: Electron Microscopy

[0396] Graphene oxide film-supported electron microscopy grids were prepared. The gB sample solutions were vitrified using a Vitrobot (ThermoFisher). The frozen grids were transferred to a FEI Titan Krios transmission electron microscope that operates at 300 kV. Target positions were set up in the SerialEM program, and high magnification (18000×) images were automatically collected with the program using a K2 direct detector camera (Gatan) using super resolution movie mode. The unbinned pixel size was 0.638 Å and the beam intensity was ˜8e/unbin pixel/s. The total electron dose on the sample for each movie was ˜40e/Å². A total of 7,771 movies, each with 28 frames, was collected in three sessions.

### Image Processing

[0397] Drift correction was done using the MotionCor2 program (Zheng S et al. Nature Methods 14, 331-332 (2017)), and the final micrographs were binned 2× and averaged from all frames. Contrast transfer function parameters were calculated with Gctf (Kai Zhang, Journal of Structural Biology 193(1), 1-12 (2016)). For particle picking, the published structure of HCMV gB in postfusion conformation (PDB:5CXF) was used to generate a 30 Å density map using pdb2mrc (EMAN) (Ludtke, S. et al. Journal of Structural Biology 128(1), 82-97 (1999)). Projection images from this density map was generated with project3d (EMAN) (FIG. 1) and used as a template for the automatic particle picking using Gautomatch program (Urnavicius L, et al. Science 347(6229): 1441-1446 (2015)). Relion v2.1-beta (Scheres, S. H. Journal of Structural Biology 180(3): 519-530 (2012)) was used to extract the resulting ˜1.9 million particles and to carry out all subsequent image processing steps, including 2D classification, 3D classification, auto-refinement and post-processing. The 2D classes were put into three groups based on the image features: the first group consisted of the 2D classes that showed features that resemble the crystallographically determined postfusion gB structure (>50%); the second group contained 2D classes with well resolved protein features that do not resemble the structural features from postfusion gB (<10%); the third group contained 2D classes that did not contain clearly defined protein (˜40%) (FIG. 1). The first and second groups were further processed with 3D classification, auto refinement and post processing procedures with Relion. Following this processing, a ˜3.5 Å resolution electron density map showing the postfusion conformation structure was reconstructed from the first group; a ˜3.6 Å resolution electron density map showing a prefusion conformation structure was reconstructed from the second group. Based on these density maps and the known HCMV gB amino acid sequence (Towne strain P13201, SEQ ID NO:1), atomic models were built with the Coot program (Emsley P. et al Acta Crystallogr D Biol Crystallogr 66(Pt 4): 486-501 (2010)) for the prefusion and postfusion conformation structures. The postfusion gB crystal structure (PDB accession code 5CXF) and a crystal structure of a complex between the SM5-1 fab and gB domain II (PDB accession code 4OT1) were used as initial models for both structures. For the postfusion structure model, small adjustment was enough to obtain a good fit to the electron density. For the prefusion conformation model, domains I, II, III and IV from the reference PDB model could be docked as rigid bodies into the electron density map as a starting point. Then, adjustments of individual residues were made for optimal fitting. The model for domains V, MPR and TM were built de novo. The models were iteratively refined with the Phenix.real_space_refine tool (Afonine PV et al. Acta Crystallogr D Struct Biol 74(Pt 6): 531-544 (2018)) followed by local manual adjusting for several rounds.

### Results

Sample Screening by cryoEM

[0398] The prefusion conformation of gB is unstable, with a propensity to rearrange to the postfusion state, including during sample handling. Therefore, the samples studied contained a mixture of gB conformers, complicating structure determination. In addition, there was no pre-existing reliable information on the arrangement of domains or the unique structural features of prefusion gB. We used direct visualization by electron microscopy and image processing to screen different sample preparation conditions. Image sorting by 2D and 3D classification permits multiple structures to be determined from heterogeneous samples. However, it requires a large data set so that enough particles for each structure can be combined to produce a class average with good signal. This was especially the case for the gB samples because prefusion gB was a small population in the mixtures. Therefore, we collected ˜1,000 movies for each condition, and decided whether to pursue image processing with more data from the same sample or switch to another at the 2D classification stage. The structure of antibody Fab-bound postfusion conformation gB was readily obtained from many datasets. The projection images from these Fab-bound postfusion conformation structures were used as a reference to avoid selecting images for the prefusion image reconstruction. We selected any good class average with protein features that did not resemble any of the postfusion gB projection images for further image processing. We screened dozens of conditions for sample preparation with this strategy and eventually found a sample that produced some alternative 2D classes as a minor species in the particle populations (FIG. 1B, circled). Then a total of 7,771 movies were collected from that sample and used for determination of a prefusion gB structure.

[0399] Projection images of the antibody Fab-bound postfusion gB structure are shown in FIG. 1A. The 2D class averages from the dataset collected are shown in FIG. 1B. Some classes that do not resemble any of the postfusion gB reference 2D projections are circled.

### Obtaining a Prefusion Conformation Structure

[0400] Approximately 1.9 million raw particle images were automatically selected from the data set. After 2D classification, the images were grouped into a postfusion class (55% of the particle population) and a prefusion class (10% of the particle population). The two groups were further processed in 3D with C3 symmetry applied to yield a density map of SM5-1 Fab-bound postfusion gB at 3.5 Å resolution and a density map of SM5-1 Fab-bound prefusion gB at 3.6 Å resolution.

[0401] The X-ray crystallography-based models of the SM5-1 Fab and of the ectodomain of postfusion gB were fit to the postfusion density map with rigid body docking. Except for the constant domain of the Fab (which is likely too flexible to produce strong electron density), the density map of the postfusion gB-Fab complex and the model agreed well with each other (FIG. 3A). The membrane proximal region, transmembrane region and cytoplasmic domain were not resolved in our final postfusion gB density map, suggesting that these regions of postfusion gB are flexible either intrinsically or through detergent solubilization in the sample preparations (FIG. 2, lower line). The interaction of the Fab and DII of postfusion gB in the electron cryomicroscopy-based model agrees well with the previously determined crystal structure of the complex (PDB accession code 4OT1).

[0402] To build a prefusion gB model, guided by the known Fab binding position, domains I, II, III and part of domain IV from the postfusion gB crystal structure were docked into the density map of the prefusion gB-Fab complex individually and individual residues were manually adjusted as necessary for optimal fit of the electron density. The rest of the prefusion gB structure was built de novo. The amino acids of gB that were modeled in the prefusion structure are indicated in FIG. 2, the top line. The model of the prefusion gB-Fab complex fits most parts of the prefusion density map, and the presence of Fab density confirms the identity of gB in the novel structure (FIG. 3B).

[0403] The coordinates and structure factors for the model of the prefusion gB associated with the present Example are provided in Table 1A described in WO2021/260510 which is hereby incorporated by reference in its entirety.

### The Structure of gB in a Prefusion Conformation and Comparison to Postfusion gB

[0404] The electron density for the complex of prefusion gB and the SM5-1 Fab allowed the building of a prefusion gB model that includes the gB ectodomain, membrane proximal region (MPR—a helical region that is oriented parallel to the viral membrane), and single span transmembrane helix(TM) (FIG. 3B and FIG. 4B). The MPR and TM regions were not resolved in the structural data for postfusion gB or included in postfusion gB models.

[0405] The overall dimensions of prefusion and postfusion gB are different (FIG. 4A vs. FIG. 4B). The postfusion gB trimer ectodomain has a rod shape, with an approximate height of 165 Å (the distance between planes formed by proline 570 of each protomer at the membrane distal end and tryptophan 240 of the each protomer at the membrane proximal end; FIG. 4A). It has a width of approximately 65 Å (the distance between alanine 315 on adjacent protomers). The structures described here were derived from gB of HCMV strain Towne. Although there is some natural variations of gB amino acid sequence, the overall postfusion structure of Towne gB is almost identical to the postfusion structure of gB from the strain AD169 (PDB accession code 5CXF). Thus, the description of the postfusion gB structure applies to both strains with measurements from equivalent amino acids from sequence alignments.

[0406] The prefusion gB trimer has a more squat shape than the postfusion gB trimer (FIG. 4A vs. FIG. 4B). The distance between the plane formed by W240 of each protomer and the most membrane distal modeled residue in the prefusion structure, Q483, is roughly 115 Å. The prefusion model is 95 Å in width (measured by the distance between any two A315 from different protomers).

[0407] The individual subunit structures of domains I, II, III and IV are similar in the prefusion and postfusion conformations. However, the overall arrangement of these domains is very different in the two conformations (FIGS. 4A-4B and FIGS. 6A-6C). In the prefusion conformation, the fusion loops at the tip of DI and the C-termini of the central helix bundle in domain III all point in the same direction, toward the virion envelope, as identified by the position of the TM region (FIG. 4A and FIG. 6A). In contrast, in the postfusion conformation, the fusion loops and the C-termini of the central helix bundle point in opposite directions (FIG. 4B and FIG. 6C).

[0408] In the prefusion structure, the hydrophobic residues in the fusion loops (residues Y155, 1156, H157 and W240, L241) are in close proximity to the MPR and are likely surrounded by detergents (FIG. 4A and FIG. 6A).

[0409] In the transition from prefusion to post fusion, domain II shifts from a position mid-way up the domain III central coiled-coil to a position at the membrane proximate end of the coiled-coil and near end of domain I opposite the fusion loops (FIG. 4A and FIG. 4B).

[0410] The structure of DIII (FIGS. 4A-4B and FIGS. 6A-6C) is very similar in the prefusion and postfusion conformations. The central helix in both conformations spans from L479 to P525, indicating a minimal rearrangement during the prefusion to postfusion transition. However, the other domains change their positions relative to the central helix of domain III, so that, as noted above, the direction of the Dill helix bundle (from N-terminal to C-terminal) points away from the fusion loops towards the distal end of the trimer in the postfusion conformation and toward the viral membrane, in the same direction as the fusion loops in the prefusion conformation.

[0411] In the prefusion structure, domain IV (FIG. 4A and FIG. 6A) is buried at the interface between domain I on the exterior of the trimer and domains Ill and V at the center of the trimer. In contrast, in the postfusion structure, domain IV forms a highly exposed “crown” at the membrane-distal tip of the trimer.

[0412] Domain V has different structures in prefusion gB (FIG. 4A and FIG. 6A) and postfusion gB (FIG. 4B and FIG. 6C). In prefusion gB, the N-terminal half of the domain (about residues 642-660) is sandwiched between domain I and domain IV of an adjacent protomer and is sequestered from solvent. The region between residue 683-704 of domain V forms a trimeric helix bundle with its counterpart in other protomers. This helix bundle is cuddled mostly inside of the pocket of the “crown” formed by domain IV. There is an additional short helix (approximately residues 710-719) linking the helix bundle from domain V to the MPR region. In contrast, in the postfusion conformation (FIG. 4B and FIG. 6C), domain V is solvent exposed and extends along the outside of domain Ill helix bundle and the groove formed by the interface between domain I from adjacent protomers.

[0413] Comparison of the prefusion and postfusion gB structures suggests a progression of conformational changes that is familiar from other well-studied fusion proteins (Harrison, S. C. Virology 0:498-507 (2015)). The comparison provides confidence that the structure described in this invention is, in fact, in a prefusion conformation. In the prefusion state (FIG. 6A), the fusion loops of domain I are buried by interaction with the MPR and potentially with the viral membrane. In the prefusion structure of the distant gB homolog, the vesicular stomatitis virus G glycoprotein, the fusion loops also point toward the viral membrane (also the anticipated position of an MPR region, which is not seen in that structure) (Roche et al. Science 315:843-8 (2007)).

[0414] Based on analogy to other fusion proteins, it is likely that rearrangement proceeds with lengthening of the central helix as part of a transition to a proposed extended intermediate between the prefusion and postfusion states (FIG. 6B). In the proposed extended intermediate state, the TM region would still be anchored in the viral membrane, and the fusion loops, now extended far from the viral membrane at the tips of a rotated and translocated domain I, would interact with a cellular membrane. The transition from the proposed extended intermediate to the postfusion conformation would involve a fold-back so that the transmembrane region and the fusion loops are again in proximity to each other at the same end of the molecule, this time both interacting with the fused viral and cellular membrane (FIG. 6C).

[0415] We speculate that, in prefusion gB, there may be dynamic changes in the length of the central helix, with the prefusion structure we have determined representing a “snapshot” of a “breathing” molecule, locked into the conformation we see in the electron density by the fusion inhibitor and by the cross-linking agent used to prepare the sample studied by electron cryomicroscopy.

### Stabilizing Factors for the Observed Prefusion Conformation

[0416] After modeling the gB amino acids into the electron density map, a region of density that was not filled by amino acid residues remained between the MPR, domain V, and the tip of domain I that contains the fusion loops (FIG. 5A). The size and shape of the unfilled density fits the chemical structure of the HCMV fusion inhibitor, N-{4-[({(1S)-1-[3,5-bis(trifluoromethyl)phenyl]ethyl}carbamothioyl)amino]phenyl}-1,3-thiazole-4-carboxamide (FIG. 5D), which had been present throughout the production of the sample studied by electron cryomicroscopy (FIG. 5B). The compound adopted a pose with a kink between the trifluoromethyl phenyl moiety and the rest of the compound. The thiazole forms contacts with hydrophobic residues of L712, A738 and Y153, Y155 from an adjacent protomer. The phenyl is surrounded in a hydrophobic environment formed by residues of L715, the aliphatic hydrocarbon of D714 from domain V, G734 and I 730 from MPR, and F752 from the TM domain of an adjacent protomer. The trifluoromethyl phenyl resides in a hydrophobic environment near the hinge between MPR and TM helixes from another protomer. It may act as a hook to prevent the outward movement of MPR and TM domains. In addition to the interaction coordinated by the inhibitor compound, the W240, Y242 from other fusion loop are forming van der waals interactions with the hydrophobic patch from the MPR region and L715 in domain V respectively. (FIG. 5C). These specific interactions around the fusion inhibitor would be expected to hold domain I, domain V, and the MPR together and restrict movements among domain I, domain V, and the MPR during the fusion process (FIGS. 6A-6C).

[0417] The effects of cross linking on the stability of the prefusion conformation were also tested. During the sample preparation steps, BS²G cross linking reagents either were or were not added. In the absence of the cross linker, the ratio of particles in prefusion versus postfusion conformations was 1:100, while the ratio was 1:4 in the sample that had been cross linked by the BS²G reagent. The cross linker was not identified in the electron density.

[0418] The prefusion structure of CMV gB and color versions of the prefusion and postfusion structures set forth in the Figures described herein may also be found in Liu et al. Science Advances 7(10): eabf3178 (2021), which is hereby incorporated by reference herein in its entirety.

### EXAMPLE 3: Expression and Purification of gB1666

[0419] For the production of gB1666, the PSB1666 construct was transiently transfected into Expi293F cells. The cell pellets were harvested 96 hours after transfection. The PSB1666 protein was purified in 25 mM HEPES pH 7.5, 250 mM NaCl, 0.02% DDM, 0.002% CHS, 3 μg/ml WAY-174865 (inhibitor, see FIG. 5D) through a series or processes of solubilization, affinity column and size exclusion chromatography. The protein was analyzed on SDS-PAGE and by EM with negative staining to ensure at least 50% of the proteins displaying prefusion conformation. The PSB1666 protein is expressed efficiently in transfection of Expi293F cells and 1 L expression would generate ˜0.1 mg of purified PSB1666 in high quality.

[0420] The polypeptide gB1666 (PSB1666) (SEQ ID NO: 57) includes a mutation in Domains I and IV. The polypeptide includes the following mutations, D217C and Y589C, relative to the corresponding wild-type gB (Towne) set forth in SEQ ID NO: 1.

### EXAMPLE 4: DNA-Expressed gB1666 is Immunogenic in Balb/c Mice

[0421] One of the proposed stabilized full length prefusion gB constructs, gB1666 (SEQ ID NO: 57), has been shown by EM to have an increased proportion of molecules in the prefusion conformation relative to wild type gB of the Towne strain after purification from transfected mammalian cells in the presence of a fusion inhibitor (WAY-174865; see FIG. 5D). To assess whether this molecule can elicit immune responses in vivo, the DNA sequence corresponding to gB1666 and wild type gB were cloned into an in-house mammalian expression vector. Ten Balb/c mice were electroporated with 100 μg of DNA encoding gB1666 twice at a three-week interval (DO and D21). An additional 10 mice were electroporated by the same protocol with DNA encoding wild type gB, and a third group was electroporated with a placebo, consisting of phosphate-buffered saline. Serum samples were collected at Day 28. ELISA was performed against recombinant gB protein produced from mammalian cells, based on the wild type sequence of Towne strain but with the transmembrane domain removed (Sino Biologicals) to determine the anti-gB IgG responses according to a standard protocol. Ten out of ten animals from the wild type gB DNA immunized mice and nine of ten gB1666 DNA immunized mice generated detectable anti-gB IgG titers (FIG. 11, showing mean±SD, LLOQ=25). The study demonstrates that gB1666 is immunogenic in Balb/c mice.

### EXAMPLE 5: Immunogenicity Study of Stabilized Prefusion gB1666 Protein Immunogenicity Study of gB1666 in Mice

[0422] To evaluate the antibody response in mice, the following immunization scheme will be followed. At week 8, mice will be exsanguinated and the neutralization titers from the immunized animal serum will be determined and compared with those immunized with gB705 (postfuion) and/or gB wild type proteins.

TABLE 5
Mouse immunogenicity study design with gB1666 protein

| | No. | | | | |
|---|---|---|---|---|---|
| | of | | | | Dosing |
| Group | Mice | Immunogen | Adjuvant | Route | Schedule |
| 1 | 10 | gB705 (postfusion) | — | 0.2 ml/SC | Weeks 0, 3, 6 |
| | | (1.25 mcg/0.2 ml) | | | |
| 2 | 10 | gB705 (postfusion) | — | 0.2 ml/SC | Weeks 0, 3, 6 |
| | | (0.25 mcg/0.2 ml) | | | |
| 3 | 10 | gB1666 (in inhibitor- | — | 0.2 ml/SC | Weeks 0, 3, 6 |
| | | containing buffer) | | | |
| | | (1.25 mcg/0.2 ml) | | | |
| 4 | 10 | gB1666 (in inhibitor- | — | 0.2 ml/SC | Weeks 0, 3, 6 |
| | | containing buffer) | | | |
| | | (0.25 mcg/0.2 ml) | | | |
| 5 | 10 | gB wt (in inhibitor- | — | 0.2 ml/SC | Weeks 0, 3, 6 |
| | | containing buffer) | | | |
| | | (1.25 mcg/0.2 ml) | | | |
| 6 | 10 | gB wt (in inhibitor- | — | 0.2 ml/SC | Weeks 0, 3, 6 |
| | | containing buffer) | | | |
| | | (0.25 mcg/0.2 ml) | | | |
| 7 | 5 | Buffer (+Inhibitor) | — | 0.2 ml/SC | Weeks 0, 3, 6 |
| 8 | 5 | Buffer only | — | 0.2 ml/SC | Weeks 0, 3, 6 |

### EXAMPLE 6

[0423] In Example 2, we disclosed the electron cryomicroscopy (cryoEM) structure of prefusion human cytomegalovirus (HCMV) strain Towne glycoprotein B (gB) in complex with an antibody fragment. The gB used for structure determination was obtained by adding a small molecule fusion inhibitor, WAY-174865, to a fermentation of authentic HCMV in mammalian cell culture and maintaining the presence of the inhibitor throughout production and analysis of gB; purifying the virus; treating the virus with a chemical cross linker, bis(sulfosuccinimidyl) glutarate (BS²G; 7.7 Å spacer arm); extracting gB from the virus with detergent; binding gB on the virion with an affinity tagged antibody fragment; and purifying the gB by affinity and sizing columns. We also disclosed the use of the prefusion gB cryoEM structure to engineer mutations that stabilize gB in the prefusion state. Specifically, we disclosed the recombinant gB protein gB1666, in which two residues are mutated to cysteine (D217C, Y589C). The resulting formation of an engineered disulfide bond between C217 and C589 increases the conformational stability of the recombinant gB in the prefusion state. gB1666 maintained prefusion structural features when it was expressed in Expi293F cells and purified in the presence of a fusion inhibitor, compound WAY-174865. In the absence of the inhibitor, gB1666 tends to undergo a conformational change and lose its prefusion structural state. Loss of prefusion conformational stability in the absence of inhibitor is not a desirable characteristic for use of the recombinant glycoprotein as an antigen for immunization. Even if gB1666 were formulated with the inhibitor, there is a risk that, upon injection into a person or animal, the dilution of the inhibitor in vivo would lead to its dissociation from gB1666 and the loss of prefusion conformation of gB1666. Thus, it is desired that HCMV gB be stabilized sufficiently in the prefusion conformation to remain in the prefusion state in the absence of WAY-174865. It is also preferable that a prefusion gB immunogen includes a soluble ectodomain to improve manufacturability, improve solubility, improve homogeneity, and reduce or eliminate the need for formulation with a detergent or other excipient to prevent aggregation or precipitation mediated by the gB transmembrane region.

[0424] We now report the invention, through a structure-based engineering approach, of new mutations in HCMV gB that confer these improved characteristics for use of prefusion gB as an immunogen. First, we determined the structure by cryoEM of gB1666, which was solubilized by anchoring in nanodiscs and stabilized in the prefusion conformation by the presence of WAY-174865 (FIG. 12). Most of the new structure of the recombinant, D217C and Y589C mutant gB is similar to the structure of the virion-derived, chemically cross-linked and antibody fragment bound HCMV Towne prefusion gB that we determined previously, but there are subtle differences between the two structures in certain local regions. The difference in the structures could reflect several differences in the preparations: first, the presence of the engineered disulfide bond in gB1666, which should restrict the breathing motion of the glycoprotein; second, the anchoring of gB1666 in a nanodisc, which provides a more natural local lipid environment for the transmembrane domain than the detergents used to extract and maintain gB in solution for the previous structure determination; third, the absence of chemical cross-linking of gB1666; fourth, the higher resolution of the new structure at 3.3 Å, compared to the 3.6 Å resolution of the previous structure, allowing more accurate modeling of amino acid side chains.

[0425] Based on the new structural information, we designed additional stabilizing mutations on the background of the full length gB construct pSB1666 (Table 6 and Table 7). We hypothesized that adding these additional mutations on the pSB1666 background would further stabilize the gB in a prefusion state (FIG. 13). For example, cysteine mutations at residues M371 and W506 may introduce a disulfide bond between domains II and Ill; cysteine mutations at the pairs of (F541, E681) and (N524, M684) may introduce disulfide bonds between domains IV and V; mutations of residues E686, D679 to hydrophobic residues could remove a locally destabilizing same charge repulsion patch and increase protein stability. Recombinant glycoproteins with a selection of the new, added mutations were expressed and purified in the absence of fusion inhibitor and without chemical crosslinking. The electrophoretic mobility of the expressed glycoproteins by SDS-PAGE showed the expected apparent molecular weight and heterogeneity consistent with glycosylation (FIG. 14). The samples were stored at 4° C., and aliquots were taken for negatively stained electron microscopy analysis on day 1 and day 7. In the 2D class averaged images, triangular shape features that resemble “top views” of the prefusion conformation of the gB were apparent. The ratio of particles in the population belonging to prefusion and postfusion classes were 5:1 on day 1 and 3:1 at day 7 (FIG. 15).

[0426] Based on the new structural information, we designed several soluble, detergent-free gB ectodomains (Table 8) with prefusion-stabilizing mutations as illustrated in FIGS. 16A-16D. The purified ectodomain of HCMV gB, residues 1-707, formed rosette-like aggregates, in which gB proteins associated through their exposed fusion loops. To eliminate aggregation and increase protein secretion to the condition media, we replaced four exposed hydrophobic residues within the fusion loops with the corresponding more hydrophilic amino acids from herpes simplex virus-1 (HSV-1) gB, e.g. YIH (155-157)→GHR, W240→A. We also mutated the exposed Cys246 to Ser (C246→S) to prevent formation of spurious disulfide bonds. To further stabilize the prefusion trimeric state of the antigen, we either introduced cysteine residues capable of forming inter-protomer disulfide bonds or appended C-terminal trimerization motifs, e.g. GCN4 or foldon from T4-bacteriophage fibritin. Disulfide mutations, e.g. D217C—Y589C, M317C—W506C, N524C—M684C, were further introduced to lock the proteins into the prefusion state. Recombinant glycoproteins were expressed, secreted to the conditioned media and purified in the absence of fusion inhibitor and without chemical detergent. Notably, the recombinant variant, fused to a GCN4 trimerization motif, showed optimal size-exclusion chromatography profile (FIG. 17). The negatively stained electron microscopy showed recombinant proteins, gB2555 and gB2556, as monodispersed proteins in the absence of inhibitor and detergents. Expected gB protein features are observed in the 2D class averaged images (FIG. 18 and FIG. 19). These results confirm that these engineered constructs are suitable to be used as a framework to add more stabilizing mutations towards a prefusion form of gB in the absence of inhibitor and detergents if needed.

[0427] The coordinates and structural factors for the model of the prefusion gB associated with the present Example are provided in Table 1B described in WO2021/260510 which is hereby incorporated by reference in its entirety.

TABLE 6
Exemplary cysteine pair mutations for disulfide bond stabilization.

| Row | Mutations |
|---|---|
| 1 | D217C, Y589C |
| 2 | I356C, A 500C |
| 3 | S367C, A500C |
| 4 | S367C, A503C |
| 5 | M371C, A505C |
| 6 | M371C, W506C |
| 7 | T374C, A503C |
| 8 | Y160C, Y708C |
| 9 | L162C, M716C |
| 10 | N524C, M684C |
| 11 | G99C, A267C |
| 12 | T100C, R258C |
| 13 | T221C, E657C |
| 14 | S223C, T659C |
| 15 | F541C, E681C |
| 16 | L603C, Y667C |
| 17 | N605C, K670C |
| 18 | R607C, N688C |
| 19 | E609C, K691C |

TABLE 7
Exemplary charge mutations for stabilization.

| Row | Mutations |
|---|---|
| 1 | E686L |
| 2 | E686I |
| 3 | D679A |
| 4 | R354F |
| 5 | R573F |
| 6 | D101L, K260L |

TABLE 8
Construct mutations. The constructs were made from the designs
for purpose of testing the presence of prefusion gB in the purified
recombinant protein preparation in different conditions.

| Construct | Mutation 1 | Mutation 2 | Mutation 3 | Mutation 4 |
|---|---|---|---|---|
| pSB1688 | N524C | M684C | | |
| pSB2455 | M371C | W506C | | |
| pSB2456 | F541C | E681C | | |
| pSB2457 | D217C | Y589C | M371C | W506C |
| pSB2459 | D217C | Y589C | N524C | M684C |
| pSB1666 | D217C | Y589C | | |

TABLE 9
Exemplary Soluble, detergent-free gB ectodomain proteins

| Code | gB* | Mutations | C-Term Fusion Sequence |
|---|---|---|---|
| gB707 | gB (1-707) | D217C, Y589C | |
| gB2264 | gB (1-707) | D217C, Y589C, D703C, | |
| | | P704C | |
| gB2265 | gB (1-707) | D217C, Y589C, Y696C, | |
| | | V697C | |
| gB2266 | gB (1-702) | D217C, Y589C | RIKQIEDKIEEILSKQYHIENEIARIKKLIG |
| | | | (SEQ ID NO: 255) |
| gB2267 | gB (1-702) | D217C, Y589C | KIEEILSKQYHIENEIARIKKLIG (SEQ ID |
| | | | NO: 256) |
| gB2268 | gB (1-702) | D217C, Y589C | KIYHIENEIARIKKLIG (SEQ ID NO: 257) |
| gB2269 | gB (1-703) | D217C, Y589C | LSAIGGYIPEAPRDGQAYVRKDGEWVLLS |
| | | | TFL (SEQ ID NO: 258) |
| gB2555 | gB (1-702) | D217C, M371C, W506C, | KIEEILSKQYHIENEIARIKKLIG (SEQ ID |
| | | Y589C | NO: 259) |
| gB2556 | gB (1-702) | D217C, N524C, Y589C, | KIEEILSKQYHIENEIARIKKLIG (SEQ ID |
| | | M684C | NO: 259) |
| gB2557 | gB (1-707) | D217C, N524C, Y589C, | |
| | | M684C, D703C, P704C | |

*Mutations, including YIH (155-157)→GHR, W240→A and C246→S, had been incorporated in gB to decrease aggregation and increase protein secretion.

### EXAMPLE 7: Determining Druggable Regions of HCMV gB Polypeptide

[0428] The prefusion and postfusion structures of the HCMV gB polypeptide are described in the Examples set forth hereinabove. When HCMV gB polypeptide rearranges to the postfusion structure, long beta-sheet rich globular domains are formed tipped by fusion loops that come together in a trimer, leaving grooves between them. A long, extended coil/alpha-helical structure from closer to the membrane anchor of the protein tracks up those grooves to bring the membrane anchor and fusion loops together, completing the fusion reaction that effects cell entry of the virus.

[0429] FIGS. 20A and 20B depict the space-filled model of HCMV (Towne strain) domain V (residues 1642-V697 (SEQ ID NO: 281)) in prefusion (FIG. 20A) and postfusion (FIG. 20B) structures. Hydrophobic residues are labeled. In prefusion conformation, these hydrophobic residues are disordered, but they rearrange to an amphipathic extended conformation to complement with the hydrophobic surface of other parts of the postfusion structure. For example, as shown in FIG. 20B, the region between 1642-F661 (SEQ ID NO; 282) interacts with the surface formed by Q485-L520 (SEQ ID NO: 283) from the other two protomers; the region between L672-V697 (SEQ ID NO: 284) interacts with the same region from the other two protomers. This structure arrangement is necessary to drive the fusion between the virus and host cell membranes.

[0430] This conformational change creates a druggable region in HCMV gB polypeptide domain V up the groove between domains I and II in the post-fusion form.

[0431] FIG. 21A-21C show (FIG. 21A) the HCMV gB (Towne Strain) domain V (light grey) and its binding pocket (dark grey) in postfusion conformation and (FIG. 21B) the the space-filled model of the pocket without domain V is shown. FIG. 21C shows a ribbon representation of the same structure as in FIG. 21A with certain residues labeled.

[0432] In one embodiment, peptides corresponding to parts of the long extended coil/a-helix that tracks up the grooves are added to the virus to compete with their authentic counterparts for occupancy of the grooves, preventing completion of the rearrangement, thereby blocking membrane fusion, virus entry, and virus infectivity. In another embodiment, blockade of binding of the peptides into the groove may be used to screen a library of small molecules, leading to the discovery of small molecule CMV fusion inhibitors.

[0433] This invention provides peptides comprising residues (Towne strain) of SEQ ID NO:1 selected from the group consisting of M648-K700 (SEQ ID NO: 260), M648-V697 (SEQ ID NO: 261), S647-V697 (SEQ ID NO: 262), S647-V663 (SEQ ID NO: 263), 1653-V697 (SEQ ID NO: 264), 1653-Q692 (SEQ ID NO: 265), 1653-L680 (SEQ ID NO: 266), 1653-S675 (SEQ ID NO: 267), 1653-Y667 (SEQ ID NO: 268), R662-V697 (SEQ ID NO: 269), R662-Q692 (SEQ ID NO: 270), R662-L680 (SEQ ID NO: 271), R662-S675 (SEQ ID NO: 272), L664-F678 (SEQ ID NO: 273), S668-V697 (SEQ ID NO: 274), S668-Q692 (SEQ ID NO: 275), S668-V677 (SEQ ID NO: 276), D679-V697 (SEQ ID NO: 277), L680-V697 (SEQ ID NO: 278), L680-Q692 (SEQ ID NO: 279), and R693-K700 (SEQ ID NO: 280).

### Verification Experiments for Peptide Activity

[0434] The above-described peptides (see also Table 10) are synthesized and tested in a virus cell infection inhibitory activity. The peptides are expected to have a potency to reduce 50% infection (IC50) at a concentration around 10uM or lower, comparable to peptides with similar functions in dengue virus (A. G. Schmidt, P. L. Yang, S. C. Harrison, Peptide inhibitors of dengue-virus entry target a late-stage fusion intermediate. PLoS Pathog 6, e1000851 (2010)). The engagement of selected peptides in the druggable region of gB may be verified with binding assays. These include a measurement of the binding affinity by SPR to show the dissociation constant (Kd) at around 10uM or lower and cryoEM structure to show the density for the peptide in the druggable region of gB. A druggable region of HCMV gB comprises residues K130-A135, D216-W233, R258-K260, A267-V273, R327-D329, W349-E350, V480-K518 and N676-Y690 of SEQ ID NO: 1. The residues of the druggable region are in a postfusion conformation.

[0435] These methods are well known to those of skill in the art and described in more detail below:

### 1. Virus Infection Inhibition Assay

[0436] HCMV infection is tested in MRC-5 fibrolast cells and ARPE-19 epithelial cells by a microneutralization assay. Briefly, cells are seeded in 96 well plates overnight at 37° C., 5% CO₂. Serially diluted peptides are combined with HCMV Towne strain or VR1814 at approximately 500 pfu/well and allowed to incubate for one hour at 37° C. The mixture is then transferred to MRC-5 or ARPE-19 cells and allowed to infect for 24 hours at 37° C., 5% CO₂. After fixing with methanol, HCMV-infected cells are detected by immunostaining using a mouse monoclonal anti-HCMV immediate early protein IE1 antibody (developed in-house). A secondary antibody, Alexa Flour 488 labeled Goat anti-mouse IgG (H+L) (Molecular Probes) antibody is then used for counting infected cells using a CTL-ImmunoSpot Analyzer. Titers that inhibit 50% of the infectivity of the samples (IC₅₀) are determined by interpolation using a 4-parameter nonlinear regression.

### 2. Binding Affinity by SPR

[0437] For measuring the binding of HCMV gB protein and peptides, the SPR CM5 sensor chip surface is prepared with 1×HBSP+(0.01 M Hepes pH 7.4, 0.15 M NaCl, 0.05% v/v Surfactant P20) running buffer. All flow cells are activated with 0.4 M EDC+0.1 M NHS, and amine-coupled with Anti-Avi pAb in 10 mM Acetate pH 4.5. The surface will then be blocked with 0.1 M EDA in 0.2 M borate buffer pH 8.5, and then regenerated three times with 75 mM phosphoric acid.

[0438] Multicycle kinetic assays are performed at room temperature with 1×HBSP+supplemented with 1 g/L BSA as running buffer. For capture, purified HCMV gB proteins are diluted to 0.2 μg/mL and loaded onto flow-cell 2 of each channel. The designed gB peptides will then be injected at a concentration of 100 uM for the initial binding screen. If positive binding peptides are identified, then the positive peptides are injected at concentrations of 0, 5, 10, 20, 50, and 100 uM for measuring the binding kinetics. At the end of every cycle, the surface is regenerated three times with 75 mM phosphate.

3. Binding to the Druggable Site by cryoEM

[0439] A purified gB protein that lack domain V, MPR, TM and cytoplasmic domains (roughly ends at residue 642 of SEQ ID NO: 1) and in its postfusion form is used in this experiment. The protein is incubated with the designed peptide at room temperature for 4 hours with about two-fold molar excess of the peptide. The sample is then subject to cryo grids preparation and imaging in cryo conditions. The reconstructed structure is obtained by popular image processing software such as CryoSparc (A. Punjani, J. L. Rubinstein, D. J. Fleet, M. A. Brubaker, cryoSPARC: algorithms for rapid unsupervised cryo-EM structure determination. Nat Methods 14, 290-296 (2017)) or Relion (S. H. Scheres, RELION: implementation of a Bayesian approach to cryo-EM structure determination. J Struct Biol 180, 519-530 (2012)). The specific druggable site binding is verified by the presence of the peptide density in the corresponding location as in the postfusion structure.

[0440] Unlike other viruses, CMV causes lifelong infection. Accordingly, these CMV modulators or inhibitors may be used to treat subjects suffering from CMV infection or to prevent infection in transplant patients or patients with immunodeficiency. In another embodiment, the modulators or inhibitors may be used to treat newborns with CMV infection to prevent or reduce the manifestations of congenital CMV. Treatment of prevention in newborns may also comprise administering to pregnant women.

TABLE 10

| SEQ | | |
|---|---|---|
| ID | | |
| NO: | Description | Sequence |
| 260 | M648-K700 of | MIALDIDPLENTDFRVLELYSQKELRSSNVFDLEEIMREFNSY |
| | SEQ ID NO: 1 | KQRVKYVEDK |
| 261 | M648-V697 of | MIALDIDPLENTDFRVLELYSQKELRSSNVFDLEEIMREFNSY |
| | SEQ ID NO: 1 | KQRVKYV |
| 262 | S647-V697 of | SMIALDIDPLENTDFRVLELYSQKELRSSNVFDLEEIMREFNS |
| | SEQ ID NO: 1 | YKQRVKYV |
| 263 | S647-V663 of | SMIALDIDPLENTDFRV |
| | SEQ ID NO: 1 | |
| 264 | I653-V697 of | IDPLENTDFRVLELYSQKELRSSNVFDLEEIMREFNSYKQRV |
| | SEQ ID NO: 1 | KYV |
| 265 | I653-Q692 of | IDPLENTDFRVLELYSQKELRSSNVFDLEEIMREFNSYKQ |
| | SEQ ID NO: 1 | |
| 266 | I653-L680 of | IDPLENTDFRVLELYSQKELRSSNVFDL |
| | SEQ ID NO: 1 | |
| 267 | I653-S675 of | IDPLENTDFRVLELYSQKELRSS |
| | SEQ ID NO: 1 | |
| 268 | I653-Y667 of | IDPLENTDFRVLELY |
| | SEQ ID NO: 1 | |
| 269 | R662-V697 of | RVLELYSQKELRSSNVFDLEEIMREFNSYKQRVKYV |
| | SEQ ID NO: 1 | |
| 270 | R662-Q692 of | RVLELYSQKELRSSNVFDLEEIMREFNSYKQ |
| | SEQ ID NO: 1 | |
| 271 | R662-L680 of | RVLELYSQKELRSSNVFDL |
| | SEQ ID NO: 1 | |
| 272 | R662-S675 of | RVLELYSQKELRSS |
| | SEQ ID NO: 1 | |
| 273 | L664-F678 of | LELYSQKELRSSNVF |
| | SEQ ID NO: 1 | |
| 274 | S668-V697 of | SQKELRSSNVFDLEEIMREFNSYKQRVKYV |
| | SEQ ID NO: 1 | |
| 275 | S668-Q692 of | SQKELRSSNVFDLEEIMREFNSYKQ |
| | SEQ ID NO: 1 | |
| 276 | S668-V677 of | SQKELRSSNV |
| | SEQ ID NO: 1 | |
| 277 | D679-V697 of | DLEEIMREFNSYKQRVKYV |
| | SEQ ID NO: 1 | |
| 278 | L680-V697 of | LEEIMREFNSYKQRVKYV |
| | SEQ ID NO: 1 | |
| 279 | L680-Q692 of | LEEIMREFNSYKQ |
| | SEQ ID NO: 1 | |
| 280 | R693-K700 of | RVKYVEDK |
| | SEQ ID NO: 1 | |
| 281 | I642-V697 of | ISTVDSMIALDIDPLENTDFRVLELYSQKELRSSNVFDLEEIM |
| | SEQ ID NO: 1 | REFNSYKQRVKYV |
| 282 | I642-F661 of | ISTVDSMIALDIDPLENTDF |
| | SEQ ID NO: 1 | |
| 283 | Q485-L520 of | QFTYDTLRGYINRALAQIAEAWCVDQRRTLEVFKEL |
| | SEQ ID NO: 1 | |
| 284 | L672-V697 of | LRSSNVFDLEEIMREFNSYKQRVKYV |
| | SEQ ID NO: 1 | |
| 285 | K130-A135 of | KRNIVA |
| | SEQ ID NO: 1 | |
| 286 | D216-W233 of | DDYSNTHSTRYVTVKDQW |
| | SEQ ID NO: 1 | |
| | R258-K260 of | RSK |
| | SEQ ID NO: 1 | |
| 287 | A267-V273 of | ATSTGDV |
| | SEQ ID NO: 1 | |
| | R327-D329 of | RAD |
| | SEQ ID NO: 1 | |
| | W349-E350 of | WE |
| | SEQ ID NO: 1 | |
| 288 | V480-K518 of | VYAQLQFTYDTLRGYINRALAQIAEAWCVDQRRTLEVFK |
| | SEQ ID NO: 1 | |
| 289 | N676-Y690 of | NVFDLEEIMREFNSY |
| | SEQ ID NO: 1 | |

### Embodiments of the Present Invention are Set Out in the Following Numbered Clauses

[0441] C1. A method for identifying a candidate therapeutic for treating or preventing a disease caused by a human cytomegalovirus (HCMV) infection comprising contacting a HCMV having a glycoprotein B (gB) polypeptide which comprises a druggable region with a compound, wherein binding of said compound indicates a candidate therapeutic.

[0442] C2. A method for identifying a candidate therapeutic for treating or preventing a disease caused by HCMV infection, comprising contacting a HCMV gB polypeptide comprising a druggable region with a compound, wherein the modulation of the function or activity of said gB polypeptide indicates a candidate therapeutic.

[0443] C3. The method of clause C2, wherein said modulation of the activity of said gB polypeptide involves precluding the binding of domain V to the domain V binding groove in the postfusion conformation.

[0444] C4. A method for identifying a candidate therapeutic for treating or preventing a disease caused by infection with HCMV having a gB polypeptide, comprising contacting the gB polypeptide comprising a druggable region with a compound, wherein the inhibition of fusion of said virus indicates a candidate therapeutic.

[0445] C5. A method for identifying a candidate therapeutic for a disease caused by infection with HCMV having a gB polypeptide, comprising contacting the gB polypeptide comprising a druggable region with a compound, wherein the inhibition of viral infectivity of said virus indicates a candidate therapeutic.

[0446] C6. A method for identifying a candidate therapeutic for a disease caused by infection with HCMV having a gB polypeptide, comprising contacting the gB polypeptide comprising a druggable region with a compound, wherein the reduction of at least one symptom of said disease in a subject indicates a candidate therapeutic.

[0447] C7. The method of any one of clauses C1-C6, wherein said compound is selected from the following classes of compounds: proteins, peptides, polypeptides, peptidomimetics, antibodies, nucleic acids, and small molecules.

[0448] C8. The method of clause C7, wherein binding is determined using an in vitro assay.

[0449] C9. The method of clause C7, wherein binding is determined using an in vivo assay.

[0450] C10. The method of clause C7, wherein the druggable region comprises at least one residue from residues K130-A135, D216-W233, R258-K260, A267-V273, R327-D329, W349-E350, V480-K518 or N676-Y690 of SEQ ID NO: 1.

[0451] C11. The method of clause C10, wherein the residue of the druggable region is in a postfusion conformation.

[0452] C12. The method of any one of clauses C1-C11, wherein the compound is a peptide comprising residues (Towne strain) of SEQ ID NO:1 selected from the group consisting of M648-K700 (SEQ ID NO: 260), M648-V697 (SEQ ID NO: 261), S647-V697 (SEQ ID NO: 262), S647-V663 (SEQ ID NO: 263), 1653-V697 (SEQ ID NO: 264), 1653-Q692 (SEQ ID NO: 265), 1653-L680 (SEQ ID NO: 266), 1653-S675 (SEQ ID NO: 267), 1653-Y667 (SEQ ID NO: 268), R662-V697 (SEQ ID NO: 269), R662-Q692 (SEQ ID NO: 270), R662-L680 (SEQ ID NO: 271), R662-S675 (SEQ ID NO: 272), L664-F678 (SEQ ID NO: 273), S668-V697 (SEQ ID NO: 274), S668-Q692 (SEQ ID NO: 275), S668-V677 (SEQ ID NO: 276), D679-V697 (SEQ ID NO: 277), L680-V697 (SEQ ID NO: 278), L680-Q692 (SEQ ID NO: 279), and R693-K700 (SEQ ID NO: 280).

[0453] C13. The method of any one of clauses C1-C11, wherein said compound is in a library of compounds.

[0454] C14. The method of clause C13, wherein said library is generated using combinatorial synthetic methods.

[0455] C15. A candidate therapeutic, wherein said candidate therapeutic is a modulator of HCMV activity which interacts with domain V region of glycoprotein B (gB) of HCMV.

[0456] C16. A candidate therapeutic, wherein said candidate therapeutic is a modulator of HCMV activity which precludes the movement of domain V of glycoprotein B (gB) of HCMV.

[0457] C17. A candidate therapeutic, wherein said candidate therapeutic is a modulator of HCMV activity which precludes completion of the conformational change by interacting with at least one residue from the domain V residues at the trimer interface formed by any subunit in the postfusion trimer.

[0458] C18. A candidate therapeutic, wherein the candidate therapeutic is an inhibitor of HCMV activity comprising a polypeptide sequence with at least 80% homology to SEQ ID NO: 1.

[0459] C19. The candidate therapeutic of clauses C15-C18, wherein the candidate inhibitor is a peptide comprising residues of SEQ ID NO:1 (Towne strain) selected from the group consisting of M648-K700 (SEQ ID NO: 260), M648-V697 (SEQ ID NO: 261), S647-V697 (SEQ ID NO: 262), S647-V663 (SEQ ID NO: 263), 1653-V697 (SEQ ID NO: 264), 1653-Q692 (SEQ ID NO: 265), 1653-L680 (SEQ ID NO: 266), 1653-S675 (SEQ ID NO: 267), 1653-Y667 (SEQ ID NO: 268), R662-V697 (SEQ ID NO: 269), R662-Q692 (SEQ ID NO: 270), R662-L680 (SEQ ID NO: 271), R662-S675 (SEQ ID NO: 272), L664-F678 (SEQ ID NO: 273), S668-V697 (SEQ ID NO: 274), S668-Q692 (SEQ ID NO: 275), S668-V677 (SEQ ID NO: 276), D679-V697 (SEQ ID NO: 277), L680-V697 (SEQ ID NO: 278), L680-Q692 (SEQ ID NO: 279), and R693-K700 (SEQ ID NO: 280).

[0460] C20. The candidate therapeutic of clauses C15-C19, wherein the candidate therapeutic is a nucleic acid.

[0461] C21. A pharmaceutical composition comprising a candidate therapeutic of any of clauses C15-C20.

[0462] C22. A method of treating a subject having a disease or disorder associated with HCMV infection comprising administering to said subject a pharmaceutical composition of clause C21.

[0463] C23. A method of preventing a disease or disorder associated with HCMV infection in a subject comprising administering to said subject a pharmaceutical composition of clause C21.

[0464] C24. A kit for treating or preventing a disease or disorder associated with HCMV infection, comprising a pharmaceutical composition of clause C21 and optionally instructions for use.

[0465] C25. A druggable region of HCMV gB comprising residues K130-A135, D216-W233, R258-K260, A267-V273, R327-D329, W349-E350, V480-K518 and N676-Y690 of SEQ ID NO: 1.

[0466] C26. The druggable region of HCMV gB of clause C25, wherein the residues of the druggable region are in a postfusion conformation.

1. A method for identifying a candidate therapeutic for treating or preventing a disease caused by a human cytomegalovirus (HCMV) infection comprising contacting a HCMV having a glycoprotein B (gB) polypeptide which comprises a druggable region with a compound, wherein binding of said compound indicates a candidate therapeutic.

2. A method for identifying a candidate therapeutic for treating or preventing a disease caused by HCMV infection, comprising contacting a HCMV gB polypeptide comprising a druggable region with a compound, wherein the modulation of the function or activity of said gB polypeptide indicates a candidate therapeutic.

3. The method of claim 2, wherein said modulation of the activity of said gB polypeptide involves precluding the binding of domain V to the domain V binding groove in the postfusion conformation.

4. A method for identifying a candidate therapeutic for treating or preventing a disease caused by infection with HCMV having a gB polypeptide, comprising contacting the gB polypeptide comprising a druggable region with a compound, wherein the inhibition of fusion of said virus indicates a candidate therapeutic.

5. A method for identifying a candidate therapeutic for a disease caused by infection with HCMV having a gB polypeptide, comprising contacting the gB polypeptide comprising a druggable region with a compound, wherein the inhibition of viral infectivity of said virus indicates a candidate therapeutic.

6. A method for identifying a candidate therapeutic for a disease caused by infection with HCMV having a gB polypeptide, comprising contacting the gB polypeptide comprising a druggable region with a compound, wherein the reduction of at least one symptom of said disease in a subject indicates a candidate therapeutic.

7. The method of any one of claims 1-6, wherein said compound is selected from the following classes of compounds: proteins, peptides, polypeptides, peptidomimetics, antibodies, nucleic acids, and small molecules.

8. The method of claim 7, wherein binding is determined using an in vitro assay.

9. The method of claim 7, wherein binding is determined using an in vivo assay.

10. The method of claim 7, wherein the druggable region comprises at least one residue from residues K130-A135, D216-W233, R258-K260, A267-V273, R327-D329, W349-E350, V480-K518 or N676-Y690 of SEQ ID NO: 1.

11. The method of claim 10, wherein the residue of the druggable region is in a postfusion conformation.

12. The method of any one of claims 1-11, wherein the compound is a peptide comprising residues (Towne strain) of SEQ ID NO:1 selected from the group consisting of M648-K700 (SEQ ID NO: 260), M648-V697 (SEQ ID NO: 261), S647-V697 (SEQ ID NO: 262), S647-V663 (SEQ ID NO: 263), 1653-V697 (SEQ ID NO: 264), 1653-Q692 (SEQ ID NO: 265), 1653-L680 (SEQ ID NO: 266), 1653-S675 (SEQ ID NO: 267), 1653-Y667 (SEQ ID NO: 268), R662-V697 (SEQ ID NO: 269), R662-Q692 (SEQ ID NO: 270), R662-L680 (SEQ ID NO: 271), R662-S675 (SEQ ID NO: 272), L664-F678 (SEQ ID NO: 273), S668-V697 (SEQ ID NO: 274), S668-Q692 (SEQ ID NO: 275), S668-V677 (SEQ ID NO: 276), D679-V697 (SEQ ID NO: 277), L680-V697 (SEQ ID NO: 278), L680-Q692 (SEQ ID NO: 279), and R693-K700 (SEQ ID NO: 280).

13. The method of any one of claims 1-11, wherein said compound is in a library of compounds.

14. The method of claim 13, wherein said library is generated using combinatorial synthetic methods.

15. A candidate therapeutic, wherein said candidate therapeutic is a modulator of HCMV activity which interacts with domain V region of glycoprotein B (gB) of HCMV.

16. A candidate therapeutic, wherein said candidate therapeutic is a modulator of HCMV activity which precludes the movement of domain V of glycoprotein B (gB) of HCMV.

17. A candidate therapeutic, wherein said candidate therapeutic is a modulator of HCMV activity which precludes completion of the conformational change by interacting with at least one residue from the domain V residues at the trimer interface formed by any subunit in the postfusion trimer.

18. A candidate therapeutic, wherein the candidate therapeutic is an inhibitor of HCMV activity comprising a polypeptide sequence with at least 80% homology to SEQ ID NO: 1.

19. The candidate therapeutic of claims 15-18, wherein the candidate inhibitor is a peptide comprising residues of SEQ ID NO:1 (Towne strain) selected from the group consisting of M648-K700 (SEQ ID NO: 260), M648-V697 (SEQ ID NO: 261), S647-V697 (SEQ ID NO: 262), S647-V663 (SEQ ID NO: 263), 1653-V697 (SEQ ID NO: 264), 1653-Q692 (SEQ ID NO: 265), 1653-L680 (SEQ ID NO: 266), 1653-S675 (SEQ ID NO: 267), 1653-Y667 (SEQ ID NO: 268), R662-V697 (SEQ ID NO: 269), R662-Q692 (SEQ ID NO: 270), R662-L680 (SEQ ID NO: 271), R662-S675 (SEQ ID NO: 272), L664-F678 (SEQ ID NO: 273), S668-V697 (SEQ ID NO: 274), S668-Q692 (SEQ ID NO: 275), S668-V677 (SEQ ID NO: 276), D679-V697 (SEQ ID NO: 277), L680-V697 (SEQ ID NO: 278), L680-Q692 (SEQ ID NO: 279), and R693-K700 (SEQ ID NO: 280).

20. The candidate therapeutic of claims 15-19, wherein the candidate therapeutic is a nucleic acid.

21. A pharmaceutical composition comprising a candidate therapeutic of any of claims 15-20.

22. A method of treating a subject having a disease or disorder associated with HCMV infection comprising administering to said subject a pharmaceutical composition of claim 21.

23. A method of preventing a disease or disorder associated with HCMV infection in a subject comprising administering to said subject a pharmaceutical composition of claim 21.

24. A kit for treating or preventing a disease or disorder associated with HCMV infection, comprising a pharmaceutical composition of claim 21 and optionally instructions for use.

25. A druggable region of HCMV gB comprising residues K130-A135, D216-W233, R258-K260, A267-V273, R327-D329, W349-E350, V480-K518 and N676-Y690 of SEQ ID NO: 1.

26. The druggable region of HCMV gB of claim 25, wherein the residues of the druggable region are in a postfusion conformation.

The application's sequence listing, which the Patent Office published only in electronic form, follows.

SEQUENCE LISTING (289 sequences)

SEQ ID NO: 1 - protein, 907 aa, Artificial Sequence
  Synthetic amino acid sequence: Original HCMV gB (Towne) sequence
MESRIWCLVVCVNLCIVCLGAAVSSSSTRGTSATHSHHSSHTTSAAHSRSGSVSQRVTSSQTVSHGVNETIYNTTLKYGDVVGVNTTKYPYRVCSMAQGTDLIRFERNIVCTSMKPINEDLDEGIMVVYKRNIVAHTFKVRVYQKVLTFRRSYAYIHTTYLLGSNTEYVAPPMWEIHHINSHSQCYSSYSRVIAGTVFVAYHRDSYENKTMQLMPDDYSNTHSTRYVTVKDQWHSRGSTWLYRETCNLNCMVTITTARSKYPYHFFATSTGDVVDISPFYNGTNRNASYFGENADKFFIFPNYTIVSDFGRPNSALETHRLVAFLERADSVISWDIQDEKNVTCQLTFWEASERTIRSEAEDSYHFSSAKMTATFLSKKQEVNMSDSALDCVRDEAINKLQQIFNTSYNQTYEKYGNVSVFETTGGLVVFWQGIKQKSLVELERLANRSSLNLTHNRTKRSTDGNNATHLSNMESVHNLVYAQLQFTYDTLRGYINRALAQIAEAWCVDQRRTLEVFKELSKINPSAILSAIYNKPIAARFMGDVLGLASCVTINQTSVKVLRDMNVKESPGRCYSRPVVIFNFANSSYVQYGQLGEDNEILLGNHRTEECQLPSLKIFIAGNSAYEYVDYLFKRMIDLSSISTVDSMIALDIDPLENTDFRVLELYSQKELRSSNVFDLEEIMREFNSYKQRVKYVEDKVVDPLPPYLKGLDDLMSGLGAAGKAVGVAIGAVGGAVASVVEGVATFLKNPFGAFTIILVAIAVVIIIYLIYTRQRRLCMQPLQNLFPYLVSADGTTVTSGNTKDTSLQAPPSYEESVYNSGRKGPGPPSSDASTAAPPYTNEQAYQMLLALVRLDAEQRAQQNGTDSLDGQTGTQDKGQKPNLLDRLRHRKNGYRHLKDSDEEENV

SEQ ID NO: 2 - protein, 907 aa, Artificial Sequence
  Synthetic amino acid sequence: gB-001 Q98C, G271C sequence
MESRIWCLVVCVNLCIVCLGAAVSSSSTRGTSATHSHHSSHTTSAAHSRSGSVSQRVTSSQTVSHGVNETIYNTTLKYGDVVGVNTTKYPYRVCSMACGTDLIRFERNIVCTSMKPINEDLDEGIMVVYKRNIVAHTFKVRVYQKVLTFRRSYAYIHTTYLLGSNTEYVAPPMWEIHHINSHSQCYSSYSRVIAGTVFVAYHRDSYENKTMQLMPDDYSNTHSTRYVTVKDQWHSRGSTWLYRETCNLNCMVTITTARSKYPYHFFATSTCDVVDISPFYNGTNRNASYFGENADKFFIFPNYTIVSDFGRPNSALETHRLVAFLERADSVISWDIQDEKNVTCQLTFWEASERTIRSEAEDSYHFSSAKMTATFLSKKQEVNMSDSALDCVRDEAINKLQQIFNTSYNQTYEKYGNVSVFETTGGLVVFWQGIKQKSLVELERLANRSSLNLTHNRTKRSTDGNNATHLSNMESVHNLVYAQLQFTYDTLRGYINRALAQIAEAWCVDQRRTLEVFKELSKINPSAILSAIYNKPIAARFMGDVLGLASCVTINQTSVKVLRDMNVKESPGRCYSRPVVIFNFANSSYVQYGQLGEDNEILLGNHRTEECQLPSLKIFIAGNSAYEYVDYLFKRMIDLSSISTVDSMIALDIDPLENTDFRVLELYSQKELRSSNVFDLEEIMREFNSYKQRVKYVEDKVVDPLPPYLKGLDDLMSGLGAAGKAVGVAIGAVGGAVASVVEGVATFLKNPFGAFTIILVAIAVVIIIYLIYTRQRRLCMQPLQNLFPYLVSADGTTVTSGNTKDTSLQAPPSYEESVYNSGRKGPGPPSSDASTAAPPYTNEQAYQMLLALVRLDAEQRAQQNGTDSLDGQTGTQDKGQKPNLLDRLRHRKNGYRHLKDSDEEENV

SEQ ID NO: 3 - protein, 907 aa, Artificial Sequence
  Synthetic amino acid sequence: gB-002  Q98C, I653C sequence
MESRIWCLVVCVNLCIVCLGAAVSSSSTRGTSATHSHHSSHTTSAAHSRSGSVSQRVTSSQTVSHGVNETIYNTTLKYGDVVGVNTTKYPYRVCSMACGTDLIRFERNIVCTSMKPINEDLDEGIMVVYKRNIVAHTFKVRVYQKVLTFRRSYAYIHTTYLLGSNTEYVAPPMWEIHHINSHSQCYSSYSRVIAGTVFVAYHRDSYENKTMQLMPDDYSNTHSTRYVTVKDQWHSRGSTWLYRETCNLNCMVTITTARSKYPYHFFATSTGDVVDISPFYNGTNRNASYFGENADKFFIFPNYTIVSDFGRPNSALETHRLVAFLERADSVISWDIQDEKNVTCQLTFWEASERTIRSEAEDSYHFSSAKMTATFLSKKQEVNMSDSALDCVRDEAINKLQQIFNTSYNQTYEKYGNVSVFETTGGLVVFWQGIKQKSLVELERLANRSSLNLTHNRTKRSTDGNNATHLSNMESVHNLVYAQLQFTYDTLRGYINRALAQIAEAWCVDQRRTLEVFKELSKINPSAILSAIYNKPIAARFMGDVLGLASCVTINQTSVKVLRDMNVKESPGRCYSRPVVIFNFANSSYVQYGQLGEDNEILLGNHRTEECQLPSLKIFIAGNSAYEYVDYLFKRMIDLSSISTVDSMIALDCDPLENTDFRVLELYSQKELRSSNVFDLEEIMREFNSYKQRVKYVEDKVVDPLPPYLKGLDDLMSGLGAAGKAVGVAIGAVGGAVASVVEGVATFLKNPFGAFTIILVAIAVVIIIYLIYTRQRRLCMQPLQNLFPYLVSADGTTVTSGNTKDTSLQAPPSYEESVYNSGRKGPGPPSSDASTAAPPYTNEQAYQMLLALVRLDAEQRAQQNGTDSLDGQTGTQDKGQKPNLLDRLRHRKNGYRHLKDSDEEENV

SEQ ID NO: 4 - protein, 907 aa, Artificial Sequence
  Synthetic amino acid sequence: gB-003 G99C, A267C
MESRIWCLVVCVNLCIVCLGAAVSSSSTRGTSATHSHHSSHTTSAAHSRSGSVSQRVTSSQTVSHGVNETIYNTTLKYGDVVGVNTTKYPYRVCSMAQCTDLIRFERNIVCTSMKPINEDLDEGIMVVYKRNIVAHTFKVRVYQKVLTFRRSYAYIHTTYLLGSNTEYVAPPMWEIHHINSHSQCYSSYSRVIAGTVFVAYHRDSYENKTMQLMPDDYSNTHSTRYVTVKDQWHSRGSTWLYRETCNLNCMVTITTARSKYPYHFFCTSTGDVVDISPFYNGTNRNASYFGENADKFFIFPNYTIVSDFGRPNSALETHRLVAFLERADSVISWDIQDEKNVTCQLTFWEASERTIRSEAEDSYHFSSAKMTATFLSKKQEVNMSDSALDCVRDEAINKLQQIFNTSYNQTYEKYGNVSVFETTGGLVVFWQGIKQKSLVELERLANRSSLNLTHNRTKRSTDGNNATHLSNMESVHNLVYAQLQFTYDTLRGYINRALAQIAEAWCVDQRRTLEVFKELSKINPSAILSAIYNKPIAARFMGDVLGLASCVTINQTSVKVLRDMNVKESPGRCYSRPVVIFNFANSSYVQYGQLGEDNEILLGNHRTEECQLPSLKIFIAGNSAYEYVDYLFKRMIDLSSISTVDSMIALDIDPLENTDFRVLELYSQKELRSSNVFDLEEIMREFNSYKQRVKYVEDKVVDPLPPYLKGLDDLMSGLGAAGKAVGVAIGAVGGAVASVVEGVATFLKNPFGAFTIILVAIAVVIIIYLIYTRQRRLCMQPLQNLFPYLVSADGTTVTSGNTKDTSLQAPPSYEESVYNSGRKGPGPPSSDASTAAPPYTNEQAYQMLLALVRLDAEQRAQQNGTDSLDGQTGTQDKGQKPNLLDRLRHRKNGYRHLKDSDEEENV

SEQ ID NO: 5 - protein, 907 aa, Artificial Sequence
  Synthetic amino acid sequence: gB-004 T100C, A267C
MESRIWCLVVCVNLCIVCLGAAVSSSSTRGTSATHSHHSSHTTSAAHSRSGSVSQRVTSSQTVSHGVNETIYNTTLKYGDVVGVNTTKYPYRVCSMAQGCDLIRFERNIVCTSMKPINEDLDEGIMVVYKRNIVAHTFKVRVYQKVLTFRRSYAYIHTTYLLGSNTEYVAPPMWEIHHINSHSQCYSSYSRVIAGTVFVAYHRDSYENKTMQLMPDDYSNTHSTRYVTVKDQWHSRGSTWLYRETCNLNCMVTITTARSKYPYHFFCTSTGDVVDISPFYNGTNRNASYFGENADKFFIFPNYTIVSDFGRPNSALETHRLVAFLERADSVISWDIQDEKNVTCQLTFWEASERTIRSEAEDSYHFSSAKMTATFLSKKQEVNMSDSALDCVRDEAINKLQQIFNTSYNQTYEKYGNVSVFETTGGLVVFWQGIKQKSLVELERLANRSSLNLTHNRTKRSTDGNNATHLSNMESVHNLVYAQLQFTYDTLRGYINRALAQIAEAWCVDQRRTLEVFKELSKINPSAILSAIYNKPIAARFMGDVLGLASCVTINQTSVKVLRDMNVKESPGRCYSRPVVIFNFANSSYVQYGQLGEDNEILLGNHRTEECQLPSLKIFIAGNSAYEYVDYLFKRMIDLSSISTVDSMIALDIDPLENTDFRVLELYSQKELRSSNVFDLEEIMREFNSYKQRVKYVEDKVVDPLPPYLKGLDDLMSGLGAAGKAVGVAIGAVGGAVASVVEGVATFLKNPFGAFTIILVAIAVVIIIYLIYTRQRRLCMQPLQNLFPYLVSADGTTVTSGNTKDTSLQAPPSYEESVYNSGRKGPGPPSSDASTAAPPYTNEQAYQMLLALVRLDAEQRAQQNGTDSLDGQTGTQDKGQKPNLLDRLRHRKNGYRHLKDSDEEENV

SEQ ID NO: 6 - protein, 907 aa, Artificial Sequence
  Synthetic amino acid sequence: gB-005 T100C, S269C
MESRIWCLVVCVNLCIVCLGAAVSSSSTRGTSATHSHHSSHTTSAAHSRSGSVSQRVTSSQTVSHGVNETIYNTTLKYGDVVGVNTTKYPYRVCSMAQGCDLIRFERNIVCTSMKPINEDLDEGIMVVYKRNIVAHTFKVRVYQKVLTFRRSYAYIHTTYLLGSNTEYVAPPMWEIHHINSHSQCYSSYSRVIAGTVFVAYHRDSYENKTMQLMPDDYSNTHSTRYVTVKDQWHSRGSTWLYRETCNLNCMVTITTARSKYPYHFFATCTGDVVDISPFYNGTNRNASYFGENADKFFIFPNYTIVSDFGRPNSALETHRLVAFLERADSVISWDIQDEKNVTCQLTFWEASERTIRSEAEDSYHFSSAKMTATFLSKKQEVNMSDSALDCVRDEAINKLQQIFNTSYNQTYEKYGNVSVFETTGGLVVFWQGIKQKSLVELERLANRSSLNLTHNRTKRSTDGNNATHLSNMESVHNLVYAQLQFTYDTLRGYINRALAQIAEAWCVDQRRTLEVFKELSKINPSAILSAIYNKPIAARFMGDVLGLASCVTINQTSVKVLRDMNVKESPGRCYSRPVVIFNFANSSYVQYGQLGEDNEILLGNHRTEECQLPSLKIFIAGNSAYEYVDYLFKRMIDLSSISTVDSMIALDIDPLENTDFRVLELYSQKELRSSNVFDLEEIMREFNSYKQRVKYVEDKVVDPLPPYLKGLDDLMSGLGAAGKAVGVAIGAVGGAVASVVEGVATFLKNPFGAFTIILVAIAVVIIIYLIYTRQRRLCMQPLQNLFPYLVSADGTTVTSGNTKDTSLQAPPSYEESVYNSGRKGPGPPSSDASTAAPPYTNEQAYQMLLALVRLDAEQRAQQNGTDSLDGQTGTQDKGQKPNLLDRLRHRKNGYRHLKDSDEEENV

SEQ ID NO: 7 - protein, 907 aa, Artificial Sequence
  Synthetic amino acid sequence: gB-006 T100C, L651C
MESRIWCLVVCVNLCIVCLGAAVSSSSTRGTSATHSHHSSHTTSAAHSRSGSVSQRVTSSQTVSHGVNETIYNTTLKYGDVVGVNTTKYPYRVCSMAQGCDLIRFERNIVCTSMKPINEDLDEGIMVVYKRNIVAHTFKVRVYQKVLTFRRSYAYIHTTYLLGSNTEYVAPPMWEIHHINSHSQCYSSYSRVIAGTVFVAYHRDSYENKTMQLMPDDYSNTHSTRYVTVKDQWHSRGSTWLYRETCNLNCMVTITTARSKYPYHFFATSTGDVVDISPFYNGTNRNASYFGENADKFFIFPNYTIVSDFGRPNSALETHRLVAFLERADSVISWDIQDEKNVTCQLTFWEASERTIRSEAEDSYHFSSAKMTATFLSKKQEVNMSDSALDCVRDEAINKLQQIFNTSYNQTYEKYGNVSVFETTGGLVVFWQGIKQKSLVELERLANRSSLNLTHNRTKRSTDGNNATHLSNMESVHNLVYAQLQFTYDTLRGYINRALAQIAEAWCVDQRRTLEVFKELSKINPSAILSAIYNKPIAARFMGDVLGLASCVTINQTSVKVLRDMNVKESPGRCYSRPVVIFNFANSSYVQYGQLGEDNEILLGNHRTEECQLPSLKIFIAGNSAYEYVDYLFKRMIDLSSISTVDSMIACDIDPLENTDFRVLELYSQKELRSSNVFDLEEIMREFNSYKQRVKYVEDKVVDPLPPYLKGLDDLMSGLGAAGKAVGVAIGAVGGAVASVVEGVATFLKNPFGAFTIILVAIAVVIIIYLIYTRQRRLCMQPLQNLFPYLVSADGTTVTSGNTKDTSLQAPPSYEESVYNSGRKGPGPPSSDASTAAPPYTNEQAYQMLLALVRLDAEQRAQQNGTDSLDGQTGTQDKGQKPNLLDRLRHRKNGYRHLKDSDEEENV

SEQ ID NO: 8 - protein, 907 aa, Artificial Sequence
  Synthetic amino acid sequence: gB-007 D217C, F584C
MESRIWCLVVCVNLCIVCLGAAVSSSSTRGTSATHSHHSSHTTSAAHSRSGSVSQRVTSSQTVSHGVNETIYNTTLKYGDVVGVNTTKYPYRVCSMAQGTDLIRFERNIVCTSMKPINEDLDEGIMVVYKRNIVAHTFKVRVYQKVLTFRRSYAYIHTTYLLGSNTEYVAPPMWEIHHINSHSQCYSSYSRVIAGTVFVAYHRDSYENKTMQLMPDCYSNTHSTRYVTVKDQWHSRGSTWLYRETCNLNCMVTITTARSKYPYHFFATSTGDVVDISPFYNGTNRNASYFGENADKFFIFPNYTIVSDFGRPNSALETHRLVAFLERADSVISWDIQDEKNVTCQLTFWEASERTIRSEAEDSYHFSSAKMTATFLSKKQEVNMSDSALDCVRDEAINKLQQIFNTSYNQTYEKYGNVSVFETTGGLVVFWQGIKQKSLVELERLANRSSLNLTHNRTKRSTDGNNATHLSNMESVHNLVYAQLQFTYDTLRGYINRALAQIAEAWCVDQRRTLEVFKELSKINPSAILSAIYNKPIAARFMGDVLGLASCVTINQTSVKVLRDMNVKESPGRCYSRPVVIFNCANSSYVQYGQLGEDNEILLGNHRTEECQLPSLKIFIAGNSAYEYVDYLFKRMIDLSSISTVDSMIALDIDPLENTDFRVLELYSQKELRSSNVFDLEEIMREFNSYKQRVKYVEDKVVDPLPPYLKGLDDLMSGLGAAGKAVGVAIGAVGGAVASVVEGVATFLKNPFGAFTIILVAIAVVIIIYLIYTRQRRLCMQPLQNLFPYLVSADGTTVTSGNTKDTSLQAPPSYEESVYNSGRKGPGPPSSDASTAAPPYTNEQAYQMLLALVRLDAEQRAQQNGTDSLDGQTGTQDKGQKPNLLDRLRHRKNGYRHLKDSDEEENV

SEQ ID NO: 9 - protein, 907 aa, Artificial Sequence
  Synthetic amino acid sequence: gB-008 Y218C, A585C
MESRIWCLVVCVNLCIVCLGAAVSSSSTRGTSATHSHHSSHTTSAAHSRSGSVSQRVTSSQTVSHGVNETIYNTTLKYGDVVGVNTTKYPYRVCSMAQGTDLIRFERNIVCTSMKPINEDLDEGIMVVYKRNIVAHTFKVRVYQKVLTFRRSYAYIHTTYLLGSNTEYVAPPMWEIHHINSHSQCYSSYSRVIAGTVFVAYHRDSYENKTMQLMPDDCSNTHSTRYVTVKDQWHSRGSTWLYRETCNLNCMVTITTARSKYPYHFFATSTGDVVDISPFYNGTNRNASYFGENADKFFIFPNYTIVSDFGRPNSALETHRLVAFLERADSVISWDIQDEKNVTCQLTFWEASERTIRSEAEDSYHFSSAKMTATFLSKKQEVNMSDSALDCVRDEAINKLQQIFNTSYNQTYEKYGNVSVFETTGGLVVFWQGIKQKSLVELERLANRSSLNLTHNRTKRSTDGNNATHLSNMESVHNLVYAQLQFTYDTLRGYINRALAQIAEAWCVDQRRTLEVFKELSKINPSAILSAIYNKPIAARFMGDVLGLASCVTINQTSVKVLRDMNVKESPGRCYSRPVVIFNFCNSSYVQYGQLGEDNEILLGNHRTEECQLPSLKIFIAGNSAYEYVDYLFKRMIDLSSISTVDSMIALDIDPLENTDFRVLELYSQKELRSSNVFDLEEIMREFNSYKQRVKYVEDKVVDPLPPYLKGLDDLMSGLGAAGKAVGVAIGAVGGAVASVVEGVATFLKNPFGAFTIILVAIAVVIIIYLIYTRQRRLCMQPLQNLFPYLVSADGTTVTSGNTKDTSLQAPPSYEESVYNSGRKGPGPPSSDASTAAPPYTNEQAYQMLLALVRLDAEQRAQQNGTDSLDGQTGTQDKGQKPNLLDRLRHRKNGYRHLKDSDEEENV

SEQ ID NO: 10 - protein, 907 aa, Artificial Sequence
  Synthetic amino acid sequence: gB-009 S219C, D654C
MESRIWCLVVCVNLCIVCLGAAVSSSSTRGTSATHSHHSSHTTSAAHSRSGSVSQRVTSSQTVSHGVNETIYNTTLKYGDVVGVNTTKYPYRVCSMAQGTDLIRFERNIVCTSMKPINEDLDEGIMVVYKRNIVAHTFKVRVYQKVLTFRRSYAYIHTTYLLGSNTEYVAPPMWEIHHINSHSQCYSSYSRVIAGTVFVAYHRDSYENKTMQLMPDDYCNTHSTRYVTVKDQWHSRGSTWLYRETCNLNCMVTITTARSKYPYHFFATSTGDVVDISPFYNGTNRNASYFGENADKFFIFPNYTIVSDFGRPNSALETHRLVAFLERADSVISWDIQDEKNVTCQLTFWEASERTIRSEAEDSYHFSSAKMTATFLSKKQEVNMSDSALDCVRDEAINKLQQIFNTSYNQTYEKYGNVSVFETTGGLVVFWQGIKQKSLVELERLANRSSLNLTHNRTKRSTDGNNATHLSNMESVHNLVYAQLQFTYDTLRGYINRALAQIAEAWCVDQRRTLEVFKELSKINPSAILSAIYNKPIAARFMGDVLGLASCVTINQTSVKVLRDMNVKESPGRCYSRPVVIFNFANSSYVQYGQLGEDNEILLGNHRTEECQLPSLKIFIAGNSAYEYVDYLFKRMIDLSSISTVDSMIALDICPLENTDFRVLELYSQKELRSSNVFDLEEIMREFNSYKQRVKYVEDKVVDPLPPYLKGLDDLMSGLGAAGKAVGVAIGAVGGAVASVVEGVATFLKNPFGAFTIILVAIAVVIIIYLIYTRQRRLCMQPLQNLFPYLVSADGTTVTSGNTKDTSLQAPPSYEESVYNSGRKGPGPPSSDASTAAPPYTNEQAYQMLLALVRLDAEQRAQQNGTDSLDGQTGTQDKGQKPNLLDRLRHRKNGYRHLKDSDEEENV

SEQ ID NO: 11 - protein, 907 aa, Artificial Sequence
  Synthetic amino acid sequence: gB-010 N220C, D652C
MESRIWCLVVCVNLCIVCLGAAVSSSSTRGTSATHSHHSSHTTSAAHSRSGSVSQRVTSSQTVSHGVNETIYNTTLKYGDVVGVNTTKYPYRVCSMAQGTDLIRFERNIVCTSMKPINEDLDEGIMVVYKRNIVAHTFKVRVYQKVLTFRRSYAYIHTTYLLGSNTEYVAPPMWEIHHINSHSQCYSSYSRVIAGTVFVAYHRDSYENKTMQLMPDDYSCTHSTRYVTVKDQWHSRGSTWLYRETCNLNCMVTITTARSKYPYHFFATSTGDVVDISPFYNGTNRNASYFGENADKFFIFPNYTIVSDFGRPNSALETHRLVAFLERADSVISWDIQDEKNVTCQLTFWEASERTIRSEAEDSYHFSSAKMTATFLSKKQEVNMSDSALDCVRDEAINKLQQIFNTSYNQTYEKYGNVSVFETTGGLVVFWQGIKQKSLVELERLANRSSLNLTHNRTKRSTDGNNATHLSNMESVHNLVYAQLQFTYDTLRGYINRALAQIAEAWCVDQRRTLEVFKELSKINPSAILSAIYNKPIAARFMGDVLGLASCVTINQTSVKVLRDMNVKESPGRCYSRPVVIFNFANSSYVQYGQLGEDNEILLGNHRTEECQLPSLKIFIAGNSAYEYVDYLFKRMIDLSSISTVDSMIALCIDPLENTDFRVLELYSQKELRSSNVFDLEEIMREFNSYKQRVKYVEDKVVDPLPPYLKGLDDLMSGLGAAGKAVGVAIGAVGGAVASVVEGVATFLKNPFGAFTIILVAIAVVIIIYLIYTRQRRLCMQPLQNLFPYLVSADGTTVTSGNTKDTSLQAPPSYEESVYNSGRKGPGPPSSDASTAAPPYTNEQAYQMLLALVRLDAEQRAQQNGTDSLDGQTGTQDKGQKPNLLDRLRHRKNGYRHLKDSDEEENV

SEQ ID NO: 12 - protein, 907 aa, Artificial Sequence
  Synthetic amino acid sequence: gB-011 T221C, D652C
MESRIWCLVVCVNLCIVCLGAAVSSSSTRGTSATHSHHSSHTTSAAHSRSGSVSQRVTSSQTVSHGVNETIYNTTLKYGDVVGVNTTKYPYRVCSMAQGTDLIRFERNIVCTSMKPINEDLDEGIMVVYKRNIVAHTFKVRVYQKVLTFRRSYAYIHTTYLLGSNTEYVAPPMWEIHHINSHSQCYSSYSRVIAGTVFVAYHRDSYENKTMQLMPDDYSNCHSTRYVTVKDQWHSRGSTWLYRETCNLNCMVTITTARSKYPYHFFATSTGDVVDISPFYNGTNRNASYFGENADKFFIFPNYTIVSDFGRPNSALETHRLVAFLERADSVISWDIQDEKNVTCQLTFWEASERTIRSEAEDSYHFSSAKMTATFLSKKQEVNMSDSALDCVRDEAINKLQQIFNTSYNQTYEKYGNVSVFETTGGLVVFWQGIKQKSLVELERLANRSSLNLTHNRTKRSTDGNNATHLSNMESVHNLVYAQLQFTYDTLRGYINRALAQIAEAWCVDQRRTLEVFKELSKINPSAILSAIYNKPIAARFMGDVLGLASCVTINQTSVKVLRDMNVKESPGRCYSRPVVIFNFANSSYVQYGQLGEDNEILLGNHRTEECQLPSLKIFIAGNSAYEYVDYLFKRMIDLSSISTVDSMIALCIDPLENTDFRVLELYSQKELRSSNVFDLEEIMREFNSYKQRVKYVEDKVVDPLPPYLKGLDDLMSGLGAAGKAVGVAIGAVGGAVASVVEGVATFLKNPFGAFTIILVAIAVVIIIYLIYTRQRRLCMQPLQNLFPYLVSADGTTVTSGNTKDTSLQAPPSYEESVYNSGRKGPGPPSSDASTAAPPYTNEQAYQMLLALVRLDAEQRAQQNGTDSLDGQTGTQDKGQKPNLLDRLRHRKNGYRHLKDSDEEENV

SEQ ID NO: 13 - protein, 907 aa, Artificial Sequence
  Synthetic amino acid sequence: gB-012 W240C, G718C
MESRIWCLVVCVNLCIVCLGAAVSSSSTRGTSATHSHHSSHTTSAAHSRSGSVSQRVTSSQTVSHGVNETIYNTTLKYGDVVGVNTTKYPYRVCSMAQGTDLIRFERNIVCTSMKPINEDLDEGIMVVYKRNIVAHTFKVRVYQKVLTFRRSYAYIHTTYLLGSNTEYVAPPMWEIHHINSHSQCYSSYSRVIAGTVFVAYHRDSYENKTMQLMPDDYSNTHSTRYVTVKDQWHSRGSTCLYRETCNLNCMVTITTARSKYPYHFFATSTGDVVDISPFYNGTNRNASYFGENADKFFIFPNYTIVSDFGRPNSALETHRLVAFLERADSVISWDIQDEKNVTCQLTFWEASERTIRSEAEDSYHFSSAKMTATFLSKKQEVNMSDSALDCVRDEAINKLQQIFNTSYNQTYEKYGNVSVFETTGGLVVFWQGIKQKSLVELERLANRSSLNLTHNRTKRSTDGNNATHLSNMESVHNLVYAQLQFTYDTLRGYINRALAQIAEAWCVDQRRTLEVFKELSKINPSAILSAIYNKPIAARFMGDVLGLASCVTINQTSVKVLRDMNVKESPGRCYSRPVVIFNFANSSYVQYGQLGEDNEILLGNHRTEECQLPSLKIFIAGNSAYEYVDYLFKRMIDLSSISTVDSMIALDIDPLENTDFRVLELYSQKELRSSNVFDLEEIMREFNSYKQRVKYVEDKVVDPLPPYLKGLDDLMSCLGAAGKAVGVAIGAVGGAVASVVEGVATFLKNPFGAFTIILVAIAVVIIIYLIYTRQRRLCMQPLQNLFPYLVSADGTTVTSGNTKDTSLQAPPSYEESVYNSGRKGPGPPSSDASTAAPPYTNEQAYQMLLALVRLDAEQRAQQNGTDSLDGQTGTQDKGQKPNLLDRLRHRKNGYRHLKDSDEEENV

SEQ ID NO: 14 - protein, 907 aa, Artificial Sequence
  Synthetic amino acid sequence: gB-013 Y242C, K710C
MESRIWCLVVCVNLCIVCLGAAVSSSSTRGTSATHSHHSSHTTSAAHSRSGSVSQRVTSSQTVSHGVNETIYNTTLKYGDVVGVNTTKYPYRVCSMAQGTDLIRFERNIVCTSMKPINEDLDEGIMVVYKRNIVAHTFKVRVYQKVLTFRRSYAYIHTTYLLGSNTEYVAPPMWEIHHINSHSQCYSSYSRVIAGTVFVAYHRDSYENKTMQLMPDDYSNTHSTRYVTVKDQWHSRGSTWLCRETCNLNCMVTITTARSKYPYHFFATSTGDVVDISPFYNGTNRNASYFGENADKFFIFPNYTIVSDFGRPNSALETHRLVAFLERADSVISWDIQDEKNVTCQLTFWEASERTIRSEAEDSYHFSSAKMTATFLSKKQEVNMSDSALDCVRDEAINKLQQIFNTSYNQTYEKYGNVSVFETTGGLVVFWQGIKQKSLVELERLANRSSLNLTHNRTKRSTDGNNATHLSNMESVHNLVYAQLQFTYDTLRGYINRALAQIAEAWCVDQRRTLEVFKELSKINPSAILSAIYNKPIAARFMGDVLGLASCVTINQTSVKVLRDMNVKESPGRCYSRPVVIFNFANSSYVQYGQLGEDNEILLGNHRTEECQLPSLKIFIAGNSAYEYVDYLFKRMIDLSSISTVDSMIALDIDPLENTDFRVLELYSQKELRSSNVFDLEEIMREFNSYKQRVKYVEDKVVDPLPPYLCGLDDLMSGLGAAGKAVGVAIGAVGGAVASVVEGVATFLKNPFGAFTIILVAIAVVIIIYLIYTRQRRLCMQPLQNLFPYLVSADGTTVTSGNTKDTSLQAPPSYEESVYNSGRKGPGPPSSDASTAAPPYTNEQAYQMLLALVRLDAEQRAQQNGTDSLDGQTGTQDKGQKPNLLDRLRHRKNGYRHLKDSDEEENV

SEQ ID NO: 15 - protein, 907 aa, Artificial Sequence
  Synthetic amino acid sequence: gB-014 Y242C, D714C
MESRIWCLVVCVNLCIVCLGAAVSSSSTRGTSATHSHHSSHTTSAAHSRSGSVSQRVTSSQTVSHGVNETIYNTTLKYGDVVGVNTTKYPYRVCSMAQGTDLIRFERNIVCTSMKPINEDLDEGIMVVYKRNIVAHTFKVRVYQKVLTFRRSYAYIHTTYLLGSNTEYVAPPMWEIHHINSHSQCYSSYSRVIAGTVFVAYHRDSYENKTMQLMPDDYSNTHSTRYVTVKDQWHSRGSTWLCRETCNLNCMVTITTARSKYPYHFFATSTGDVVDISPFYNGTNRNASYFGENADKFFIFPNYTIVSDFGRPNSALETHRLVAFLERADSVISWDIQDEKNVTCQLTFWEASERTIRSEAEDSYHFSSAKMTATFLSKKQEVNMSDSALDCVRDEAINKLQQIFNTSYNQTYEKYGNVSVFETTGGLVVFWQGIKQKSLVELERLANRSSLNLTHNRTKRSTDGNNATHLSNMESVHNLVYAQLQFTYDTLRGYINRALAQIAEAWCVDQRRTLEVFKELSKINPSAILSAIYNKPIAARFMGDVLGLASCVTINQTSVKVLRDMNVKESPGRCYSRPVVIFNFANSSYVQYGQLGEDNEILLGNHRTEECQLPSLKIFIAGNSAYEYVDYLFKRMIDLSSISTVDSMIALDIDPLENTDFRVLELYSQKELRSSNVFDLEEIMREFNSYKQRVKYVEDKVVDPLPPYLKGLDCLMSGLGAAGKAVGVAIGAVGGAVASVVEGVATFLKNPFGAFTIILVAIAVVIIIYLIYTRQRRLCMQPLQNLFPYLVSADGTTVTSGNTKDTSLQAPPSYEESVYNSGRKGPGPPSSDASTAAPPYTNEQAYQMLLALVRLDAEQRAQQNGTDSLDGQTGTQDKGQKPNLLDRLRHRKNGYRHLKDSDEEENV

SEQ ID NO: 16 - protein, 907 aa, Artificial Sequence
  Synthetic amino acid sequence: gB-015 S269C, I653C
MESRIWCLVVCVNLCIVCLGAAVSSSSTRGTSATHSHHSSHTTSAAHSRSGSVSQRVTSSQTVSHGVNETIYNTTLKYGDVVGVNTTKYPYRVCSMAQGTDLIRFERNIVCTSMKPINEDLDEGIMVVYKRNIVAHTFKVRVYQKVLTFRRSYAYIHTTYLLGSNTEYVAPPMWEIHHINSHSQCYSSYSRVIAGTVFVAYHRDSYENKTMQLMPDDYSNTHSTRYVTVKDQWHSRGSTWLYRETCNLNCMVTITTARSKYPYHFFATCTGDVVDISPFYNGTNRNASYFGENADKFFIFPNYTIVSDFGRPNSALETHRLVAFLERADSVISWDIQDEKNVTCQLTFWEASERTIRSEAEDSYHFSSAKMTATFLSKKQEVNMSDSALDCVRDEAINKLQQIFNTSYNQTYEKYGNVSVFETTGGLVVFWQGIKQKSLVELERLANRSSLNLTHNRTKRSTDGNNATHLSNMESVHNLVYAQLQFTYDTLRGYINRALAQIAEAWCVDQRRTLEVFKELSKINPSAILSAIYNKPIAARFMGDVLGLASCVTINQTSVKVLRDMNVKESPGRCYSRPVVIFNFANSSYVQYGQLGEDNEILLGNHRTEECQLPSLKIFIAGNSAYEYVDYLFKRMIDLSSISTVDSMIALDCDPLENTDFRVLELYSQKELRSSNVFDLEEIMREFNSYKQRVKYVEDKVVDPLPPYLKGLDDLMSGLGAAGKAVGVAIGAVGGAVASVVEGVATFLKNPFGAFTIILVAIAVVIIIYLIYTRQRRLCMQPLQNLFPYLVSADGTTVTSGNTKDTSLQAPPSYEESVYNSGRKGPGPPSSDASTAAPPYTNEQAYQMLLALVRLDAEQRAQQNGTDSLDGQTGTQDKGQKPNLLDRLRHRKNGYRHLKDSDEEENV

SEQ ID NO: 17 - protein, 907 aa, Artificial Sequence
  Synthetic amino acid sequence: gB-016 G271C, P614C
MESRIWCLVVCVNLCIVCLGAAVSSSSTRGTSATHSHHSSHTTSAAHSRSGSVSQRVTSSQTVSHGVNETIYNTTLKYGDVVGVNTTKYPYRVCSMAQGTDLIRFERNIVCTSMKPINEDLDEGIMVVYKRNIVAHTFKVRVYQKVLTFRRSYAYIHTTYLLGSNTEYVAPPMWEIHHINSHSQCYSSYSRVIAGTVFVAYHRDSYENKTMQLMPDDYSNTHSTRYVTVKDQWHSRGSTWLYRETCNLNCMVTITTARSKYPYHFFATSTCDVVDISPFYNGTNRNASYFGENADKFFIFPNYTIVSDFGRPNSALETHRLVAFLERADSVISWDIQDEKNVTCQLTFWEASERTIRSEAEDSYHFSSAKMTATFLSKKQEVNMSDSALDCVRDEAINKLQQIFNTSYNQTYEKYGNVSVFETTGGLVVFWQGIKQKSLVELERLANRSSLNLTHNRTKRSTDGNNATHLSNMESVHNLVYAQLQFTYDTLRGYINRALAQIAEAWCVDQRRTLEVFKELSKINPSAILSAIYNKPIAARFMGDVLGLASCVTINQTSVKVLRDMNVKESPGRCYSRPVVIFNFANSSYVQYGQLGEDNEILLGNHRTEECQLCSLKIFIAGNSAYEYVDYLFKRMIDLSSISTVDSMIALDIDPLENTDFRVLELYSQKELRSSNVFDLEEIMREFNSYKQRVKYVEDKVVDPLPPYLKGLDDLMSGLGAAGKAVGVAIGAVGGAVASVVEGVATFLKNPFGAFTIILVAIAVVIIIYLIYTRQRRLCMQPLQNLFPYLVSADGTTVTSGNTKDTSLQAPPSYEESVYNSGRKGPGPPSSDASTAAPPYTNEQAYQMLLALVRLDAEQRAQQNGTDSLDGQTGTQDKGQKPNLLDRLRHRKNGYRHLKDSDEEENV

SEQ ID NO: 18 - protein, 907 aa, Artificial Sequence
  Synthetic amino acid sequence: gB-017 S367C, L499C
MESRIWCLVVCVNLCIVCLGAAVSSSSTRGTSATHSHHSSHTTSAAHSRSGSVSQRVTSSQTVSHGVNETIYNTTLKYGDVVGVNTTKYPYRVCSMAQGTDLIRFERNIVCTSMKPINEDLDEGIMVVYKRNIVAHTFKVRVYQKVLTFRRSYAYIHTTYLLGSNTEYVAPPMWEIHHINSHSQCYSSYSRVIAGTVFVAYHRDSYENKTMQLMPDDYSNTHSTRYVTVKDQWHSRGSTWLYRETCNLNCMVTITTARSKYPYHFFATSTGDVVDISPFYNGTNRNASYFGENADKFFIFPNYTIVSDFGRPNSALETHRLVAFLERADSVISWDIQDEKNVTCQLTFWEASERTIRSEAEDSYHFCSAKMTATFLSKKQEVNMSDSALDCVRDEAINKLQQIFNTSYNQTYEKYGNVSVFETTGGLVVFWQGIKQKSLVELERLANRSSLNLTHNRTKRSTDGNNATHLSNMESVHNLVYAQLQFTYDTLRGYINRACAQIAEAWCVDQRRTLEVFKELSKINPSAILSAIYNKPIAARFMGDVLGLASCVTINQTSVKVLRDMNVKESPGRCYSRPVVIFNFANSSYVQYGQLGEDNEILLGNHRTEECQLPSLKIFIAGNSAYEYVDYLFKRMIDLSSISTVDSMIALDIDPLENTDFRVLELYSQKELRSSNVFDLEEIMREFNSYKQRVKYVEDKVVDPLPPYLKGLDDLMSGLGAAGKAVGVAIGAVGGAVASVVEGVATFLKNPFGAFTIILVAIAVVIIIYLIYTRQRRLCMQPLQNLFPYLVSADGTTVTSGNTKDTSLQAPPSYEESVYNSGRKGPGPPSSDASTAAPPYTNEQAYQMLLALVRLDAEQRAQQNGTDSLDGQTGTQDKGQKPNLLDRLRHRKNGYRHLKDSDEEENV

SEQ ID NO: 19 - protein, 907 aa, Artificial Sequence
  Synthetic amino acid sequence: gB-018 T372C, W506C
MESRIWCLVVCVNLCIVCLGAAVSSSSTRGTSATHSHHSSHTTSAAHSRSGSVSQRVTSSQTVSHGVNETIYNTTLKYGDVVGVNTTKYPYRVCSMAQGTDLIRFERNIVCTSMKPINEDLDEGIMVVYKRNIVAHTFKVRVYQKVLTFRRSYAYIHTTYLLGSNTEYVAPPMWEIHHINSHSQCYSSYSRVIAGTVFVAYHRDSYENKTMQLMPDDYSNTHSTRYVTVKDQWHSRGSTWLYRETCNLNCMVTITTARSKYPYHFFATSTGDVVDISPFYNGTNRNASYFGENADKFFIFPNYTIVSDFGRPNSALETHRLVAFLERADSVISWDIQDEKNVTCQLTFWEASERTIRSEAEDSYHFSSAKMCATFLSKKQEVNMSDSALDCVRDEAINKLQQIFNTSYNQTYEKYGNVSVFETTGGLVVFWQGIKQKSLVELERLANRSSLNLTHNRTKRSTDGNNATHLSNMESVHNLVYAQLQFTYDTLRGYINRALAQIAEACCVDQRRTLEVFKELSKINPSAILSAIYNKPIAARFMGDVLGLASCVTINQTSVKVLRDMNVKESPGRCYSRPVVIFNFANSSYVQYGQLGEDNEILLGNHRTEECQLPSLKIFIAGNSAYEYVDYLFKRMIDLSSISTVDSMIALDIDPLENTDFRVLELYSQKELRSSNVFDLEEIMREFNSYKQRVKYVEDKVVDPLPPYLKGLDDLMSGLGAAGKAVGVAIGAVGGAVASVVEGVATFLKNPFGAFTIILVAIAVVIIIYLIYTRQRRLCMQPLQNLFPYLVSADGTTVTSGNTKDTSLQAPPSYEESVYNSGRKGPGPPSSDASTAAPPYTNEQAYQMLLALVRLDAEQRAQQNGTDSLDGQTGTQDKGQKPNLLDRLRHRKNGYRHLKDSDEEENV

SEQ ID NO: 20 - protein, 907 aa, Artificial Sequence
  Synthetic amino acid sequence: gB-019 F541C, Q669C
MESRIWCLVVCVNLCIVCLGAAVSSSSTRGTSATHSHHSSHTTSAAHSRSGSVSQRVTSSQTVSHGVNETIYNTTLKYGDVVGVNTTKYPYRVCSMAQGTDLIRFERNIVCTSMKPINEDLDEGIMVVYKRNIVAHTFKVRVYQKVLTFRRSYAYIHTTYLLGSNTEYVAPPMWEIHHINSHSQCYSSYSRVIAGTVFVAYHRDSYENKTMQLMPDDYSNTHSTRYVTVKDQWHSRGSTWLYRETCNLNCMVTITTARSKYPYHFFATSTGDVVDISPFYNGTNRNASYFGENADKFFIFPNYTIVSDFGRPNSALETHRLVAFLERADSVISWDIQDEKNVTCQLTFWEASERTIRSEAEDSYHFSSAKMTATFLSKKQEVNMSDSALDCVRDEAINKLQQIFNTSYNQTYEKYGNVSVFETTGGLVVFWQGIKQKSLVELERLANRSSLNLTHNRTKRSTDGNNATHLSNMESVHNLVYAQLQFTYDTLRGYINRALAQIAEAWCVDQRRTLEVFKELSKINPSAILSAIYNKPIAARCMGDVLGLASCVTINQTSVKVLRDMNVKESPGRCYSRPVVIFNFANSSYVQYGQLGEDNEILLGNHRTEECQLPSLKIFIAGNSAYEYVDYLFKRMIDLSSISTVDSMIALDIDPLENTDFRVLELYSCKELRSSNVFDLEEIMREFNSYKQRVKYVEDKVVDPLPPYLKGLDDLMSGLGAAGKAVGVAIGAVGGAVASVVEGVATFLKNPFGAFTIILVAIAVVIIIYLIYTRQRRLCMQPLQNLFPYLVSADGTTVTSGNTKDTSLQAPPSYEESVYNSGRKGPGPPSSDASTAAPPYTNEQAYQMLLALVRLDAEQRAQQNGTDSLDGQTGTQDKGQKPNLLDRLRHRKNGYRHLKDSDEEENV

SEQ ID NO: 21 - protein, 907 aa, Artificial Sequence
  Synthetic amino acid sequence: gB-020 L548C, A650C
MESRIWCLVVCVNLCIVCLGAAVSSSSTRGTSATHSHHSSHTTSAAHSRSGSVSQRVTSSQTVSHGVNETIYNTTLKYGDVVGVNTTKYPYRVCSMAQGTDLIRFERNIVCTSMKPINEDLDEGIMVVYKRNIVAHTFKVRVYQKVLTFRRSYAYIHTTYLLGSNTEYVAPPMWEIHHINSHSQCYSSYSRVIAGTVFVAYHRDSYENKTMQLMPDDYSNTHSTRYVTVKDQWHSRGSTWLYRETCNLNCMVTITTARSKYPYHFFATSTGDVVDISPFYNGTNRNASYFGENADKFFIFPNYTIVSDFGRPNSALETHRLVAFLERADSVISWDIQDEKNVTCQLTFWEASERTIRSEAEDSYHFSSAKMTATFLSKKQEVNMSDSALDCVRDEAINKLQQIFNTSYNQTYEKYGNVSVFETTGGLVVFWQGIKQKSLVELERLANRSSLNLTHNRTKRSTDGNNATHLSNMESVHNLVYAQLQFTYDTLRGYINRALAQIAEAWCVDQRRTLEVFKELSKINPSAILSAIYNKPIAARFMGDVLGCASCVTINQTSVKVLRDMNVKESPGRCYSRPVVIFNFANSSYVQYGQLGEDNEILLGNHRTEECQLPSLKIFIAGNSAYEYVDYLFKRMIDLSSISTVDSMICLDIDPLENTDFRVLELYSQKELRSSNVFDLEEIMREFNSYKQRVKYVEDKVVDPLPPYLKGLDDLMSGLGAAGKAVGVAIGAVGGAVASVVEGVATFLKNPFGAFTIILVAIAVVIIIYLIYTRQRRLCMQPLQNLFPYLVSADGTTVTSGNTKDTSLQAPPSYEESVYNSGRKGPGPPSSDASTAAPPYTNEQAYQMLLALVRLDAEQRAQQNGTDSLDGQTGTQDKGQKPNLLDRLRHRKNGYRHLKDSDEEENV

SEQ ID NO: 22 - protein, 907 aa, Artificial Sequence
  Synthetic amino acid sequence: gB-021 A549C, I653C
MESRIWCLVVCVNLCIVCLGAAVSSSSTRGTSATHSHHSSHTTSAAHSRSGSVSQRVTSSQTVSHGVNETIYNTTLKYGDVVGVNTTKYPYRVCSMAQGTDLIRFERNIVCTSMKPINEDLDEGIMVVYKRNIVAHTFKVRVYQKVLTFRRSYAYIHTTYLLGSNTEYVAPPMWEIHHINSHSQCYSSYSRVIAGTVFVAYHRDSYENKTMQLMPDDYSNTHSTRYVTVKDQWHSRGSTWLYRETCNLNCMVTITTARSKYPYHFFATSTGDVVDISPFYNGTNRNASYFGENADKFFIFPNYTIVSDFGRPNSALETHRLVAFLERADSVISWDIQDEKNVTCQLTFWEASERTIRSEAEDSYHFSSAKMTATFLSKKQEVNMSDSALDCVRDEAINKLQQIFNTSYNQTYEKYGNVSVFETTGGLVVFWQGIKQKSLVELERLANRSSLNLTHNRTKRSTDGNNATHLSNMESVHNLVYAQLQFTYDTLRGYINRALAQIAEAWCVDQRRTLEVFKELSKINPSAILSAIYNKPIAARFMGDVLGLCSCVTINQTSVKVLRDMNVKESPGRCYSRPVVIFNFANSSYVQYGQLGEDNEILLGNHRTEECQLPSLKIFIAGNSAYEYVDYLFKRMIDLSSISTVDSMIALDCDPLENTDFRVLELYSQKELRSSNVFDLEEIMREFNSYKQRVKYVEDKVVDPLPPYLKGLDDLMSGLGAAGKAVGVAIGAVGGAVASVVEGVATFLKNPFGAFTIILVAIAVVIIIYLIYTRQRRLCMQPLQNLFPYLVSADGTTVTSGNTKDTSLQAPPSYEESVYNSGRKGPGPPSSDASTAAPPYTNEQAYQMLLALVRLDAEQRAQQNGTDSLDGQTGTQDKGQKPNLLDRLRHRKNGYRHLKDSDEEENV

SEQ ID NO: 23 - protein, 907 aa, Artificial Sequence
  Synthetic amino acid sequence: gB-022 S550C, D652C
MESRIWCLVVCVNLCIVCLGAAVSSSSTRGTSATHSHHSSHTTSAAHSRSGSVSQRVTSSQTVSHGVNETIYNTTLKYGDVVGVNTTKYPYRVCSMAQGTDLIRFERNIVCTSMKPINEDLDEGIMVVYKRNIVAHTFKVRVYQKVLTFRRSYAYIHTTYLLGSNTEYVAPPMWEIHHINSHSQCYSSYSRVIAGTVFVAYHRDSYENKTMQLMPDDYSNTHSTRYVTVKDQWHSRGSTWLYRETCNLNCMVTITTARSKYPYHFFATSTGDVVDISPFYNGTNRNASYFGENADKFFIFPNYTIVSDFGRPNSALETHRLVAFLERADSVISWDIQDEKNVTCQLTFWEASERTIRSEAEDSYHFSSAKMTATFLSKKQEVNMSDSALDCVRDEAINKLQQIFNTSYNQTYEKYGNVSVFETTGGLVVFWQGIKQKSLVELERLANRSSLNLTHNRTKRSTDGNNATHLSNMESVHNLVYAQLQFTYDTLRGYINRALAQIAEAWCVDQRRTLEVFKELSKINPSAILSAIYNKPIAARFMGDVLGLACCVTINQTSVKVLRDMNVKESPGRCYSRPVVIFNFANSSYVQYGQLGEDNEILLGNHRTEECQLPSLKIFIAGNSAYEYVDYLFKRMIDLSSISTVDSMIALCIDPLENTDFRVLELYSQKELRSSNVFDLEEIMREFNSYKQRVKYVEDKVVDPLPPYLKGLDDLMSGLGAAGKAVGVAIGAVGGAVASVVEGVATFLKNPFGAFTIILVAIAVVIIIYLIYTRQRRLCMQPLQNLFPYLVSADGTTVTSGNTKDTSLQAPPSYEESVYNSGRKGPGPPSSDASTAAPPYTNEQAYQMLLALVRLDAEQRAQQNGTDSLDGQTGTQDKGQKPNLLDRLRHRKNGYRHLKDSDEEENV

SEQ ID NO: 24 - protein, 907 aa, Artificial Sequence
  Synthetic amino acid sequence: gB-023 G604C, F661C
MESRIWCLVVCVNLCIVCLGAAVSSSSTRGTSATHSHHSSHTTSAAHSRSGSVSQRVTSSQTVSHGVNETIYNTTLKYGDVVGVNTTKYPYRVCSMAQGTDLIRFERNIVCTSMKPINEDLDEGIMVVYKRNIVAHTFKVRVYQKVLTFRRSYAYIHTTYLLGSNTEYVAPPMWEIHHINSHSQCYSSYSRVIAGTVFVAYHRDSYENKTMQLMPDDYSNTHSTRYVTVKDQWHSRGSTWLYRETCNLNCMVTITTARSKYPYHFFATSTGDVVDISPFYNGTNRNASYFGENADKFFIFPNYTIVSDFGRPNSALETHRLVAFLERADSVISWDIQDEKNVTCQLTFWEASERTIRSEAEDSYHFSSAKMTATFLSKKQEVNMSDSALDCVRDEAINKLQQIFNTSYNQTYEKYGNVSVFETTGGLVVFWQGIKQKSLVELERLANRSSLNLTHNRTKRSTDGNNATHLSNMESVHNLVYAQLQFTYDTLRGYINRALAQIAEAWCVDQRRTLEVFKELSKINPSAILSAIYNKPIAARFMGDVLGLASCVTINQTSVKVLRDMNVKESPGRCYSRPVVIFNFANSSYVQYGQLGEDNEILLCNHRTEECQLPSLKIFIAGNSAYEYVDYLFKRMIDLSSISTVDSMIALDIDPLENTDCRVLELYSQKELRSSNVFDLEEIMREFNSYKQRVKYVEDKVVDPLPPYLKGLDDLMSGLGAAGKAVGVAIGAVGGAVASVVEGVATFLKNPFGAFTIILVAIAVVIIIYLIYTRQRRLCMQPLQNLFPYLVSADGTTVTSGNTKDTSLQAPPSYEESVYNSGRKGPGPPSSDASTAAPPYTNEQAYQMLLALVRLDAEQRAQQNGTDSLDGQTGTQDKGQKPNLLDRLRHRKNGYRHLKDSDEEENV

SEQ ID NO: 25 - protein, 907 aa, Artificial Sequence
  Synthetic amino acid sequence: gB-024 N605C, E665C
MESRIWCLVVCVNLCIVCLGAAVSSSSTRGTSATHSHHSSHTTSAAHSRSGSVSQRVTSSQTVSHGVNETIYNTTLKYGDVVGVNTTKYPYRVCSMAQGTDLIRFERNIVCTSMKPINEDLDEGIMVVYKRNIVAHTFKVRVYQKVLTFRRSYAYIHTTYLLGSNTEYVAPPMWEIHHINSHSQCYSSYSRVIAGTVFVAYHRDSYENKTMQLMPDDYSNTHSTRYVTVKDQWHSRGSTWLYRETCNLNCMVTITTARSKYPYHFFATSTGDVVDISPFYNGTNRNASYFGENADKFFIFPNYTIVSDFGRPNSALETHRLVAFLERADSVISWDIQDEKNVTCQLTFWEASERTIRSEAEDSYHFSSAKMTATFLSKKQEVNMSDSALDCVRDEAINKLQQIFNTSYNQTYEKYGNVSVFETTGGLVVFWQGIKQKSLVELERLANRSSLNLTHNRTKRSTDGNNATHLSNMESVHNLVYAQLQFTYDTLRGYINRALAQIAEAWCVDQRRTLEVFKELSKINPSAILSAIYNKPIAARFMGDVLGLASCVTINQTSVKVLRDMNVKESPGRCYSRPVVIFNFANSSYVQYGQLGEDNEILLGCHRTEECQLPSLKIFIAGNSAYEYVDYLFKRMIDLSSISTVDSMIALDIDPLENTDFRVLCLYSQKELRSSNVFDLEEIMREFNSYKQRVKYVEDKVVDPLPPYLKGLDDLMSGLGAAGKAVGVAIGAVGGAVASVVEGVATFLKNPFGAFTIILVAIAVVIIIYLIYTRQRRLCMQPLQNLFPYLVSADGTTVTSGNTKDTSLQAPPSYEESVYNSGRKGPGPPSSDASTAAPPYTNEQAYQMLLALVRLDAEQRAQQNGTDSLDGQTGTQDKGQKPNLLDRLRHRKNGYRHLKDSDEEENV

SEQ ID NO: 26 - protein, 907 aa, Artificial Sequence
  Synthetic amino acid sequence: gB-025 R607C, S675C
MESRIWCLVVCVNLCIVCLGAAVSSSSTRGTSATHSHHSSHTTSAAHSRSGSVSQRVTSSQTVSHGVNETIYNTTLKYGDVVGVNTTKYPYRVCSMAQGTDLIRFERNIVCTSMKPINEDLDEGIMVVYKRNIVAHTFKVRVYQKVLTFRRSYAYIHTTYLLGSNTEYVAPPMWEIHHINSHSQCYSSYSRVIAGTVFVAYHRDSYENKTMQLMPDDYSNTHSTRYVTVKDQWHSRGSTWLYRETCNLNCMVTITTARSKYPYHFFATSTGDVVDISPFYNGTNRNASYFGENADKFFIFPNYTIVSDFGRPNSALETHRLVAFLERADSVISWDIQDEKNVTCQLTFWEASERTIRSEAEDSYHFSSAKMTATFLSKKQEVNMSDSALDCVRDEAINKLQQIFNTSYNQTYEKYGNVSVFETTGGLVVFWQGIKQKSLVELERLANRSSLNLTHNRTKRSTDGNNATHLSNMESVHNLVYAQLQFTYDTLRGYINRALAQIAEAWCVDQRRTLEVFKELSKINPSAILSAIYNKPIAARFMGDVLGLASCVTINQTSVKVLRDMNVKESPGRCYSRPVVIFNFANSSYVQYGQLGEDNEILLGNHCTEECQLPSLKIFIAGNSAYEYVDYLFKRMIDLSSISTVDSMIALDIDPLENTDFRVLELYSQKELRSCNVFDLEEIMREFNSYKQRVKYVEDKVVDPLPPYLKGLDDLMSGLGAAGKAVGVAIGAVGGAVASVVEGVATFLKNPFGAFTIILVAIAVVIIIYLIYTRQRRLCMQPLQNLFPYLVSADGTTVTSGNTKDTSLQAPPSYEESVYNSGRKGPGPPSSDASTAAPPYTNEQAYQMLLALVRLDAEQRAQQNGTDSLDGQTGTQDKGQKPNLLDRLRHRKNGYRHLKDSDEEENV

SEQ ID NO: 27 - protein, 907 aa, Artificial Sequence
  Synthetic amino acid sequence: gB-026 T608C, D679C
MESRIWCLVVCVNLCIVCLGAAVSSSSTRGTSATHSHHSSHTTSAAHSRSGSVSQRVTSSQTVSHGVNETIYNTTLKYGDVVGVNTTKYPYRVCSMAQGTDLIRFERNIVCTSMKPINEDLDEGIMVVYKRNIVAHTFKVRVYQKVLTFRRSYAYIHTTYLLGSNTEYVAPPMWEIHHINSHSQCYSSYSRVIAGTVFVAYHRDSYENKTMQLMPDDYSNTHSTRYVTVKDQWHSRGSTWLYRETCNLNCMVTITTARSKYPYHFFATSTGDVVDISPFYNGTNRNASYFGENADKFFIFPNYTIVSDFGRPNSALETHRLVAFLERADSVISWDIQDEKNVTCQLTFWEASERTIRSEAEDSYHFSSAKMTATFLSKKQEVNMSDSALDCVRDEAINKLQQIFNTSYNQTYEKYGNVSVFETTGGLVVFWQGIKQKSLVELERLANRSSLNLTHNRTKRSTDGNNATHLSNMESVHNLVYAQLQFTYDTLRGYINRALAQIAEAWCVDQRRTLEVFKELSKINPSAILSAIYNKPIAARFMGDVLGLASCVTINQTSVKVLRDMNVKESPGRCYSRPVVIFNFANSSYVQYGQLGEDNEILLGNHRCEECQLPSLKIFIAGNSAYEYVDYLFKRMIDLSSISTVDSMIALDIDPLENTDFRVLELYSQKELRSSNVFCLEEIMREFNSYKQRVKYVEDKVVDPLPPYLKGLDDLMSGLGAAGKAVGVAIGAVGGAVASVVEGVATFLKNPFGAFTIILVAIAVVIIIYLIYTRQRRLCMQPLQNLFPYLVSADGTTVTSGNTKDTSLQAPPSYEESVYNSGRKGPGPPSSDASTAAPPYTNEQAYQMLLALVRLDAEQRAQQNGTDSLDGQTGTQDKGQKPNLLDRLRHRKNGYRHLKDSDEEENV

SEQ ID NO: 28 - protein, 907 aa, Artificial Sequence
  Synthetic amino acid sequence: gB-027 E609C, F678C
MESRIWCLVVCVNLCIVCLGAAVSSSSTRGTSATHSHHSSHTTSAAHSRSGSVSQRVTSSQTVSHGVNETIYNTTLKYGDVVGVNTTKYPYRVCSMAQGTDLIRFERNIVCTSMKPINEDLDEGIMVVYKRNIVAHTFKVRVYQKVLTFRRSYAYIHTTYLLGSNTEYVAPPMWEIHHINSHSQCYSSYSRVIAGTVFVAYHRDSYENKTMQLMPDDYSNTHSTRYVTVKDQWHSRGSTWLYRETCNLNCMVTITTARSKYPYHFFATSTGDVVDISPFYNGTNRNASYFGENADKFFIFPNYTIVSDFGRPNSALETHRLVAFLERADSVISWDIQDEKNVTCQLTFWEASERTIRSEAEDSYHFSSAKMTATFLSKKQEVNMSDSALDCVRDEAINKLQQIFNTSYNQTYEKYGNVSVFETTGGLVVFWQGIKQKSLVELERLANRSSLNLTHNRTKRSTDGNNATHLSNMESVHNLVYAQLQFTYDTLRGYINRALAQIAEAWCVDQRRTLEVFKELSKINPSAILSAIYNKPIAARFMGDVLGLASCVTINQTSVKVLRDMNVKESPGRCYSRPVVIFNFANSSYVQYGQLGEDNEILLGNHRTCECQLPSLKIFIAGNSAYEYVDYLFKRMIDLSSISTVDSMIALDIDPLENTDFRVLELYSQKELRSSNVCDLEEIMREFNSYKQRVKYVEDKVVDPLPPYLKGLDDLMSGLGAAGKAVGVAIGAVGGAVASVVEGVATFLKNPFGAFTIILVAIAVVIIIYLIYTRQRRLCMQPLQNLFPYLVSADGTTVTSGNTKDTSLQAPPSYEESVYNSGRKGPGPPSSDASTAAPPYTNEQAYQMLLALVRLDAEQRAQQNGTDSLDGQTGTQDKGQKPNLLDRLRHRKNGYRHLKDSDEEENV

SEQ ID NO: 29 - protein, 907 aa, Artificial Sequence
  Synthetic amino acid sequence: gB-028 R673C, S674C
MESRIWCLVVCVNLCIVCLGAAVSSSSTRGTSATHSHHSSHTTSAAHSRSGSVSQRVTSSQTVSHGVNETIYNTTLKYGDVVGVNTTKYPYRVCSMAQGTDLIRFERNIVCTSMKPINEDLDEGIMVVYKRNIVAHTFKVRVYQKVLTFRRSYAYIHTTYLLGSNTEYVAPPMWEIHHINSHSQCYSSYSRVIAGTVFVAYHRDSYENKTMQLMPDDYSNTHSTRYVTVKDQWHSRGSTWLYRETCNLNCMVTITTARSKYPYHFFATSTGDVVDISPFYNGTNRNASYFGENADKFFIFPNYTIVSDFGRPNSALETHRLVAFLERADSVISWDIQDEKNVTCQLTFWEASERTIRSEAEDSYHFSSAKMTATFLSKKQEVNMSDSALDCVRDEAINKLQQIFNTSYNQTYEKYGNVSVFETTGGLVVFWQGIKQKSLVELERLANRSSLNLTHNRTKRSTDGNNATHLSNMESVHNLVYAQLQFTYDTLRGYINRALAQIAEAWCVDQRRTLEVFKELSKINPSAILSAIYNKPIAARFMGDVLGLASCVTINQTSVKVLRDMNVKESPGRCYSRPVVIFNFANSSYVQYGQLGEDNEILLGNHRTEECQLPSLKIFIAGNSAYEYVDYLFKRMIDLSSISTVDSMIALDIDPLENTDFRVLELYSQKELCCSNVFDLEEIMREFNSYKQRVKYVEDKVVDPLPPYLKGLDDLMSGLGAAGKAVGVAIGAVGGAVASVVEGVATFLKNPFGAFTIILVAIAVVIIIYLIYTRQRRLCMQPLQNLFPYLVSADGTTVTSGNTKDTSLQAPPSYEESVYNSGRKGPGPPSSDASTAAPPYTNEQAYQMLLALVRLDAEQRAQQNGTDSLDGQTGTQDKGQKPNLLDRLRHRKNGYRHLKDSDEEENV

SEQ ID NO: 30 - protein, 907 aa, Artificial Sequence
  Synthetic amino acid sequence: gB-029 N676C, V677C
MESRIWCLVVCVNLCIVCLGAAVSSSSTRGTSATHSHHSSHTTSAAHSRSGSVSQRVTSSQTVSHGVNETIYNTTLKYGDVVGVNTTKYPYRVCSMAQGTDLIRFERNIVCTSMKPINEDLDEGIMVVYKRNIVAHTFKVRVYQKVLTFRRSYAYIHTTYLLGSNTEYVAPPMWEIHHINSHSQCYSSYSRVIAGTVFVAYHRDSYENKTMQLMPDDYSNTHSTRYVTVKDQWHSRGSTWLYRETCNLNCMVTITTARSKYPYHFFATSTGDVVDISPFYNGTNRNASYFGENADKFFIFPNYTIVSDFGRPNSALETHRLVAFLERADSVISWDIQDEKNVTCQLTFWEASERTIRSEAEDSYHFSSAKMTATFLSKKQEVNMSDSALDCVRDEAINKLQQIFNTSYNQTYEKYGNVSVFETTGGLVVFWQGIKQKSLVELERLANRSSLNLTHNRTKRSTDGNNATHLSNMESVHNLVYAQLQFTYDTLRGYINRALAQIAEAWCVDQRRTLEVFKELSKINPSAILSAIYNKPIAARFMGDVLGLASCVTINQTSVKVLRDMNVKESPGRCYSRPVVIFNFANSSYVQYGQLGEDNEILLGNHRTEECQLPSLKIFIAGNSAYEYVDYLFKRMIDLSSISTVDSMIALDIDPLENTDFRVLELYSQKELRSSCCFDLEEIMREFNSYKQRVKYVEDKVVDPLPPYLKGLDDLMSGLGAAGKAVGVAIGAVGGAVASVVEGVATFLKNPFGAFTIILVAIAVVIIIYLIYTRQRRLCMQPLQNLFPYLVSADGTTVTSGNTKDTSLQAPPSYEESVYNSGRKGPGPPSSDASTAAPPYTNEQAYQMLLALVRLDAEQRAQQNGTDSLDGQTGTQDKGQKPNLLDRLRHRKNGYRHLKDSDEEENV

SEQ ID NO: 31 - protein, 907 aa, Artificial Sequence
  Synthetic amino acid sequence: gB-030 L680C, E681C
MESRIWCLVVCVNLCIVCLGAAVSSSSTRGTSATHSHHSSHTTSAAHSRSGSVSQRVTSSQTVSHGVNETIYNTTLKYGDVVGVNTTKYPYRVCSMAQGTDLIRFERNIVCTSMKPINEDLDEGIMVVYKRNIVAHTFKVRVYQKVLTFRRSYAYIHTTYLLGSNTEYVAPPMWEIHHINSHSQCYSSYSRVIAGTVFVAYHRDSYENKTMQLMPDDYSNTHSTRYVTVKDQWHSRGSTWLYRETCNLNCMVTITTARSKYPYHFFATSTGDVVDISPFYNGTNRNASYFGENADKFFIFPNYTIVSDFGRPNSALETHRLVAFLERADSVISWDIQDEKNVTCQLTFWEASERTIRSEAEDSYHFSSAKMTATFLSKKQEVNMSDSALDCVRDEAINKLQQIFNTSYNQTYEKYGNVSVFETTGGLVVFWQGIKQKSLVELERLANRSSLNLTHNRTKRSTDGNNATHLSNMESVHNLVYAQLQFTYDTLRGYINRALAQIAEAWCVDQRRTLEVFKELSKINPSAILSAIYNKPIAARFMGDVLGLASCVTINQTSVKVLRDMNVKESPGRCYSRPVVIFNFANSSYVQYGQLGEDNEILLGNHRTEECQLPSLKIFIAGNSAYEYVDYLFKRMIDLSSISTVDSMIALDIDPLENTDFRVLELYSQKELRSSNVFDCCEIMREFNSYKQRVKYVEDKVVDPLPPYLKGLDDLMSGLGAAGKAVGVAIGAVGGAVASVVEGVATFLKNPFGAFTIILVAIAVVIIIYLIYTRQRRLCMQPLQNLFPYLVSADGTTVTSGNTKDTSLQAPPSYEESVYNSGRKGPGPPSSDASTAAPPYTNEQAYQMLLALVRLDAEQRAQQNGTDSLDGQTGTQDKGQKPNLLDRLRHRKNGYRHLKDSDEEENV

SEQ ID NO: 32 - protein, 907 aa, Artificial Sequence
  Synthetic amino acid sequence: gB-031 I683C, M684C
MESRIWCLVVCVNLCIVCLGAAVSSSSTRGTSATHSHHSSHTTSAAHSRSGSVSQRVTSSQTVSHGVNETIYNTTLKYGDVVGVNTTKYPYRVCSMAQGTDLIRFERNIVCTSMKPINEDLDEGIMVVYKRNIVAHTFKVRVYQKVLTFRRSYAYIHTTYLLGSNTEYVAPPMWEIHHINSHSQCYSSYSRVIAGTVFVAYHRDSYENKTMQLMPDDYSNTHSTRYVTVKDQWHSRGSTWLYRETCNLNCMVTITTARSKYPYHFFATSTGDVVDISPFYNGTNRNASYFGENADKFFIFPNYTIVSDFGRPNSALETHRLVAFLERADSVISWDIQDEKNVTCQLTFWEASERTIRSEAEDSYHFSSAKMTATFLSKKQEVNMSDSALDCVRDEAINKLQQIFNTSYNQTYEKYGNVSVFETTGGLVVFWQGIKQKSLVELERLANRSSLNLTHNRTKRSTDGNNATHLSNMESVHNLVYAQLQFTYDTLRGYINRALAQIAEAWCVDQRRTLEVFKELSKINPSAILSAIYNKPIAARFMGDVLGLASCVTINQTSVKVLRDMNVKESPGRCYSRPVVIFNFANSSYVQYGQLGEDNEILLGNHRTEECQLPSLKIFIAGNSAYEYVDYLFKRMIDLSSISTVDSMIALDIDPLENTDFRVLELYSQKELRSSNVFDLEECCREFNSYKQRVKYVEDKVVDPLPPYLKGLDDLMSGLGAAGKAVGVAIGAVGGAVASVVEGVATFLKNPFGAFTIILVAIAVVIIIYLIYTRQRRLCMQPLQNLFPYLVSADGTTVTSGNTKDTSLQAPPSYEESVYNSGRKGPGPPSSDASTAAPPYTNEQAYQMLLALVRLDAEQRAQQNGTDSLDGQTGTQDKGQKPNLLDRLRHRKNGYRHLKDSDEEENV

SEQ ID NO: 33 - protein, 907 aa, Artificial Sequence
  Synthetic amino acid sequence: gB-032 F687C, N688C
MESRIWCLVVCVNLCIVCLGAAVSSSSTRGTSATHSHHSSHTTSAAHSRSGSVSQRVTSSQTVSHGVNETIYNTTLKYGDVVGVNTTKYPYRVCSMAQGTDLIRFERNIVCTSMKPINEDLDEGIMVVYKRNIVAHTFKVRVYQKVLTFRRSYAYIHTTYLLGSNTEYVAPPMWEIHHINSHSQCYSSYSRVIAGTVFVAYHRDSYENKTMQLMPDDYSNTHSTRYVTVKDQWHSRGSTWLYRETCNLNCMVTITTARSKYPYHFFATSTGDVVDISPFYNGTNRNASYFGENADKFFIFPNYTIVSDFGRPNSALETHRLVAFLERADSVISWDIQDEKNVTCQLTFWEASERTIRSEAEDSYHFSSAKMTATFLSKKQEVNMSDSALDCVRDEAINKLQQIFNTSYNQTYEKYGNVSVFETTGGLVVFWQGIKQKSLVELERLANRSSLNLTHNRTKRSTDGNNATHLSNMESVHNLVYAQLQFTYDTLRGYINRALAQIAEAWCVDQRRTLEVFKELSKINPSAILSAIYNKPIAARFMGDVLGLASCVTINQTSVKVLRDMNVKESPGRCYSRPVVIFNFANSSYVQYGQLGEDNEILLGNHRTEECQLPSLKIFIAGNSAYEYVDYLFKRMIDLSSISTVDSMIALDIDPLENTDFRVLELYSQKELRSSNVFDLEEIMRECCSYKQRVKYVEDKVVDPLPPYLKGLDDLMSGLGAAGKAVGVAIGAVGGAVASVVEGVATFLKNPFGAFTIILVAIAVVIIIYLIYTRQRRLCMQPLQNLFPYLVSADGTTVTSGNTKDTSLQAPPSYEESVYNSGRKGPGPPSSDASTAAPPYTNEQAYQMLLALVRLDAEQRAQQNGTDSLDGQTGTQDKGQKPNLLDRLRHRKNGYRHLKDSDEEENV

SEQ ID NO: 34 - protein, 907 aa, Artificial Sequence
  Synthetic amino acid sequence: gB-033 Y690C, K691C
MESRIWCLVVCVNLCIVCLGAAVSSSSTRGTSATHSHHSSHTTSAAHSRSGSVSQRVTSSQTVSHGVNETIYNTTLKYGDVVGVNTTKYPYRVCSMAQGTDLIRFERNIVCTSMKPINEDLDEGIMVVYKRNIVAHTFKVRVYQKVLTFRRSYAYIHTTYLLGSNTEYVAPPMWEIHHINSHSQCYSSYSRVIAGTVFVAYHRDSYENKTMQLMPDDYSNTHSTRYVTVKDQWHSRGSTWLYRETCNLNCMVTITTARSKYPYHFFATSTGDVVDISPFYNGTNRNASYFGENADKFFIFPNYTIVSDFGRPNSALETHRLVAFLERADSVISWDIQDEKNVTCQLTFWEASERTIRSEAEDSYHFSSAKMTATFLSKKQEVNMSDSALDCVRDEAINKLQQIFNTSYNQTYEKYGNVSVFETTGGLVVFWQGIKQKSLVELERLANRSSLNLTHNRTKRSTDGNNATHLSNMESVHNLVYAQLQFTYDTLRGYINRALAQIAEAWCVDQRRTLEVFKELSKINPSAILSAIYNKPIAARFMGDVLGLASCVTINQTSVKVLRDMNVKESPGRCYSRPVVIFNFANSSYVQYGQLGEDNEILLGNHRTEECQLPSLKIFIAGNSAYEYVDYLFKRMIDLSSISTVDSMIALDIDPLENTDFRVLELYSQKELRSSNVFDLEEIMREFNSCCQRVKYVEDKVVDPLPPYLKGLDDLMSGLGAAGKAVGVAIGAVGGAVASVVEGVATFLKNPFGAFTIILVAIAVVIIIYLIYTRQRRLCMQPLQNLFPYLVSADGTTVTSGNTKDTSLQAPPSYEESVYNSGRKGPGPPSSDASTAAPPYTNEQAYQMLLALVRLDAEQRAQQNGTDSLDGQTGTQDKGQKPNLLDRLRHRKNGYRHLKDSDEEENV

SEQ ID NO: 35 - protein, 907 aa, Artificial Sequence
  Synthetic amino acid sequence: gB-034 K695C, K724C
MESRIWCLVVCVNLCIVCLGAAVSSSSTRGTSATHSHHSSHTTSAAHSRSGSVSQRVTSSQTVSHGVNETIYNTTLKYGDVVGVNTTKYPYRVCSMAQGTDLIRFERNIVCTSMKPINEDLDEGIMVVYKRNIVAHTFKVRVYQKVLTFRRSYAYIHTTYLLGSNTEYVAPPMWEIHHINSHSQCYSSYSRVIAGTVFVAYHRDSYENKTMQLMPDDYSNTHSTRYVTVKDQWHSRGSTWLYRETCNLNCMVTITTARSKYPYHFFATSTGDVVDISPFYNGTNRNASYFGENADKFFIFPNYTIVSDFGRPNSALETHRLVAFLERADSVISWDIQDEKNVTCQLTFWEASERTIRSEAEDSYHFSSAKMTATFLSKKQEVNMSDSALDCVRDEAINKLQQIFNTSYNQTYEKYGNVSVFETTGGLVVFWQGIKQKSLVELERLANRSSLNLTHNRTKRSTDGNNATHLSNMESVHNLVYAQLQFTYDTLRGYINRALAQIAEAWCVDQRRTLEVFKELSKINPSAILSAIYNKPIAARFMGDVLGLASCVTINQTSVKVLRDMNVKESPGRCYSRPVVIFNFANSSYVQYGQLGEDNEILLGNHRTEECQLPSLKIFIAGNSAYEYVDYLFKRMIDLSSISTVDSMIALDIDPLENTDFRVLELYSQKELRSSNVFDLEEIMREFNSYKQRVCYVEDKVVDPLPPYLKGLDDLMSGLGAAGCAVGVAIGAVGGAVASVVEGVATFLKNPFGAFTIILVAIAVVIIIYLIYTRQRRLCMQPLQNLFPYLVSADGTTVTSGNTKDTSLQAPPSYEESVYNSGRKGPGPPSSDASTAAPPYTNEQAYQMLLALVRLDAEQRAQQNGTDSLDGQTGTQDKGQKPNLLDRLRHRKNGYRHLKDSDEEENV

SEQ ID NO: 36 - protein, 907 aa, Artificial Sequence
  Synthetic amino acid sequence: gB-035 T746C, F747C
MESRIWCLVVCVNLCIVCLGAAVSSSSTRGTSATHSHHSSHTTSAAHSRSGSVSQRVTSSQTVSHGVNETIYNTTLKYGDVVGVNTTKYPYRVCSMAQGTDLIRFERNIVCTSMKPINEDLDEGIMVVYKRNIVAHTFKVRVYQKVLTFRRSYAYIHTTYLLGSNTEYVAPPMWEIHHINSHSQCYSSYSRVIAGTVFVAYHRDSYENKTMQLMPDDYSNTHSTRYVTVKDQWHSRGSTWLYRETCNLNCMVTITTARSKYPYHFFATSTGDVVDISPFYNGTNRNASYFGENADKFFIFPNYTIVSDFGRPNSALETHRLVAFLERADSVISWDIQDEKNVTCQLTFWEASERTIRSEAEDSYHFSSAKMTATFLSKKQEVNMSDSALDCVRDEAINKLQQIFNTSYNQTYEKYGNVSVFETTGGLVVFWQGIKQKSLVELERLANRSSLNLTHNRTKRSTDGNNATHLSNMESVHNLVYAQLQFTYDTLRGYINRALAQIAEAWCVDQRRTLEVFKELSKINPSAILSAIYNKPIAARFMGDVLGLASCVTINQTSVKVLRDMNVKESPGRCYSRPVVIFNFANSSYVQYGQLGEDNEILLGNHRTEECQLPSLKIFIAGNSAYEYVDYLFKRMIDLSSISTVDSMIALDIDPLENTDFRVLELYSQKELRSSNVFDLEEIMREFNSYKQRVKYVEDKVVDPLPPYLKGLDDLMSGLGAAGKAVGVAIGAVGGAVASVVEGVACCLKNPFGAFTIILVAIAVVIIIYLIYTRQRRLCMQPLQNLFPYLVSADGTTVTSGNTKDTSLQAPPSYEESVYNSGRKGPGPPSSDASTAAPPYTNEQAYQMLLALVRLDAEQRAQQNGTDSLDGQTGTQDKGQKPNLLDRLRHRKNGYRHLKDSDEEENV

SEQ ID NO: 37 - protein, 907 aa, Artificial Sequence
  Synthetic amino acid sequence: gB-036 K749C, N750C
MESRIWCLVVCVNLCIVCLGAAVSSSSTRGTSATHSHHSSHTTSAAHSRSGSVSQRVTSSQTVSHGVNETIYNTTLKYGDVVGVNTTKYPYRVCSMAQGTDLIRFERNIVCTSMKPINEDLDEGIMVVYKRNIVAHTFKVRVYQKVLTFRRSYAYIHTTYLLGSNTEYVAPPMWEIHHINSHSQCYSSYSRVIAGTVFVAYHRDSYENKTMQLMPDDYSNTHSTRYVTVKDQWHSRGSTWLYRETCNLNCMVTITTARSKYPYHFFATSTGDVVDISPFYNGTNRNASYFGENADKFFIFPNYTIVSDFGRPNSALETHRLVAFLERADSVISWDIQDEKNVTCQLTFWEASERTIRSEAEDSYHFSSAKMTATFLSKKQEVNMSDSALDCVRDEAINKLQQIFNTSYNQTYEKYGNVSVFETTGGLVVFWQGIKQKSLVELERLANRSSLNLTHNRTKRSTDGNNATHLSNMESVHNLVYAQLQFTYDTLRGYINRALAQIAEAWCVDQRRTLEVFKELSKINPSAILSAIYNKPIAARFMGDVLGLASCVTINQTSVKVLRDMNVKESPGRCYSRPVVIFNFANSSYVQYGQLGEDNEILLGNHRTEECQLPSLKIFIAGNSAYEYVDYLFKRMIDLSSISTVDSMIALDIDPLENTDFRVLELYSQKELRSSNVFDLEEIMREFNSYKQRVKYVEDKVVDPLPPYLKGLDDLMSGLGAAGKAVGVAIGAVGGAVASVVEGVATFLCCPFGAFTIILVAIAVVIIIYLIYTRQRRLCMQPLQNLFPYLVSADGTTVTSGNTKDTSLQAPPSYEESVYNSGRKGPGPPSSDASTAAPPYTNEQAYQMLLALVRLDAEQRAQQNGTDSLDGQTGTQDKGQKPNLLDRLRHRKNGYRHLKDSDEEENV

SEQ ID NO: 38 - protein, 907 aa, Artificial Sequence
  Synthetic amino acid sequence: gB-037 K670L
MESRIWCLVVCVNLCIVCLGAAVSSSSTRGTSATHSHHSSHTTSAAHSRSGSVSQRVTSSQTVSHGVNETIYNTTLKYGDVVGVNTTKYPYRVCSMAQGTDLIRFERNIVCTSMKPINEDLDEGIMVVYKRNIVAHTFKVRVYQKVLTFRRSYAYIHTTYLLGSNTEYVAPPMWEIHHINSHSQCYSSYSRVIAGTVFVAYHRDSYENKTMQLMPDDYSNTHSTRYVTVKDQWHSRGSTWLYRETCNLNCMVTITTARSKYPYHFFATSTGDVVDISPFYNGTNRNASYFGENADKFFIFPNYTIVSDFGRPNSALETHRLVAFLERADSVISWDIQDEKNVTCQLTFWEASERTIRSEAEDSYHFSSAKMTATFLSKKQEVNMSDSALDCVRDEAINKLQQIFNTSYNQTYEKYGNVSVFETTGGLVVFWQGIKQKSLVELERLANRSSLNLTHNRTKRSTDGNNATHLSNMESVHNLVYAQLQFTYDTLRGYINRALAQIAEAWCVDQRRTLEVFKELSKINPSAILSAIYNKPIAARFMGDVLGLASCVTINQTSVKVLRDMNVKESPGRCYSRPVVIFNFANSSYVQYGQLGEDNEILLGNHRTEECQLPSLKIFIAGNSAYEYVDYLFKRMIDLSSISTVDSMIALDIDPLENTDFRVLELYSQLELRSSNVFDLEEIMREFNSYKQRVKYVEDKVVDPLPPYLKGLDDLMSGLGAAGKAVGVAIGAVGGAVASVVEGVATFLKNPFGAFTIILVAIAVVIIIYLIYTRQRRLCMQPLQNLFPYLVSADGTTVTSGNTKDTSLQAPPSYEESVYNSGRKGPGPPSSDASTAAPPYTNEQAYQMLLALVRLDAEQRAQQNGTDSLDGQTGTQDKGQKPNLLDRLRHRKNGYRHLKDSDEEENV

SEQ ID NO: 39 - protein, 907 aa, Artificial Sequence
  Synthetic amino acid sequence: gB-038 K670F
MESRIWCLVVCVNLCIVCLGAAVSSSSTRGTSATHSHHSSHTTSAAHSRSGSVSQRVTSSQTVSHGVNETIYNTTLKYGDVVGVNTTKYPYRVCSMAQGTDLIRFERNIVCTSMKPINEDLDEGIMVVYKRNIVAHTFKVRVYQKVLTFRRSYAYIHTTYLLGSNTEYVAPPMWEIHHINSHSQCYSSYSRVIAGTVFVAYHRDSYENKTMQLMPDDYSNTHSTRYVTVKDQWHSRGSTWLYRETCNLNCMVTITTARSKYPYHFFATSTGDVVDISPFYNGTNRNASYFGENADKFFIFPNYTIVSDFGRPNSALETHRLVAFLERADSVISWDIQDEKNVTCQLTFWEASERTIRSEAEDSYHFSSAKMTATFLSKKQEVNMSDSALDCVRDEAINKLQQIFNTSYNQTYEKYGNVSVFETTGGLVVFWQGIKQKSLVELERLANRSSLNLTHNRTKRSTDGNNATHLSNMESVHNLVYAQLQFTYDTLRGYINRALAQIAEAWCVDQRRTLEVFKELSKINPSAILSAIYNKPIAARFMGDVLGLASCVTINQTSVKVLRDMNVKESPGRCYSRPVVIFNFANSSYVQYGQLGEDNEILLGNHRTEECQLPSLKIFIAGNSAYEYVDYLFKRMIDLSSISTVDSMIALDIDPLENTDFRVLELYSQFELRSSNVFDLEEIMREFNSYKQRVKYVEDKVVDPLPPYLKGLDDLMSGLGAAGKAVGVAIGAVGGAVASVVEGVATFLKNPFGAFTIILVAIAVVIIIYLIYTRQRRLCMQPLQNLFPYLVSADGTTVTSGNTKDTSLQAPPSYEESVYNSGRKGPGPPSSDASTAAPPYTNEQAYQMLLALVRLDAEQRAQQNGTDSLDGQTGTQDKGQKPNLLDRLRHRKNGYRHLKDSDEEENV

SEQ ID NO: 40 - protein, 907 aa, Artificial Sequence
  Synthetic amino acid sequence: gB-039 R673L
MESRIWCLVVCVNLCIVCLGAAVSSSSTRGTSATHSHHSSHTTSAAHSRSGSVSQRVTSSQTVSHGVNETIYNTTLKYGDVVGVNTTKYPYRVCSMAQGTDLIRFERNIVCTSMKPINEDLDEGIMVVYKRNIVAHTFKVRVYQKVLTFRRSYAYIHTTYLLGSNTEYVAPPMWEIHHINSHSQCYSSYSRVIAGTVFVAYHRDSYENKTMQLMPDDYSNTHSTRYVTVKDQWHSRGSTWLYRETCNLNCMVTITTARSKYPYHFFATSTGDVVDISPFYNGTNRNASYFGENADKFFIFPNYTIVSDFGRPNSALETHRLVAFLERADSVISWDIQDEKNVTCQLTFWEASERTIRSEAEDSYHFSSAKMTATFLSKKQEVNMSDSALDCVRDEAINKLQQIFNTSYNQTYEKYGNVSVFETTGGLVVFWQGIKQKSLVELERLANRSSLNLTHNRTKRSTDGNNATHLSNMESVHNLVYAQLQFTYDTLRGYINRALAQIAEAWCVDQRRTLEVFKELSKINPSAILSAIYNKPIAARFMGDVLGLASCVTINQTSVKVLRDMNVKESPGRCYSRPVVIFNFANSSYVQYGQLGEDNEILLGNHRTEECQLPSLKIFIAGNSAYEYVDYLFKRMIDLSSISTVDSMIALDIDPLENTDFRVLELYSQKELLSSNVFDLEEIMREFNSYKQRVKYVEDKVVDPLPPYLKGLDDLMSGLGAAGKAVGVAIGAVGGAVASVVEGVATFLKNPFGAFTIILVAIAVVIIIYLIYTRQRRLCMQPLQNLFPYLVSADGTTVTSGNTKDTSLQAPPSYEESVYNSGRKGPGPPSSDASTAAPPYTNEQAYQMLLALVRLDAEQRAQQNGTDSLDGQTGTQDKGQKPNLLDRLRHRKNGYRHLKDSDEEENV

SEQ ID NO: 41 - protein, 907 aa, Artificial Sequence
  Synthetic amino acid sequence: gB-040 R673F
MESRIWCLVVCVNLCIVCLGAAVSSSSTRGTSATHSHHSSHTTSAAHSRSGSVSQRVTSSQTVSHGVNETIYNTTLKYGDVVGVNTTKYPYRVCSMAQGTDLIRFERNIVCTSMKPINEDLDEGIMVVYKRNIVAHTFKVRVYQKVLTFRRSYAYIHTTYLLGSNTEYVAPPMWEIHHINSHSQCYSSYSRVIAGTVFVAYHRDSYENKTMQLMPDDYSNTHSTRYVTVKDQWHSRGSTWLYRETCNLNCMVTITTARSKYPYHFFATSTGDVVDISPFYNGTNRNASYFGENADKFFIFPNYTIVSDFGRPNSALETHRLVAFLERADSVISWDIQDEKNVTCQLTFWEASERTIRSEAEDSYHFSSAKMTATFLSKKQEVNMSDSALDCVRDEAINKLQQIFNTSYNQTYEKYGNVSVFETTGGLVVFWQGIKQKSLVELERLANRSSLNLTHNRTKRSTDGNNATHLSNMESVHNLVYAQLQFTYDTLRGYINRALAQIAEAWCVDQRRTLEVFKELSKINPSAILSAIYNKPIAARFMGDVLGLASCVTINQTSVKVLRDMNVKESPGRCYSRPVVIFNFANSSYVQYGQLGEDNEILLGNHRTEECQLPSLKIFIAGNSAYEYVDYLFKRMIDLSSISTVDSMIALDIDPLENTDFRVLELYSQKELFSSNVFDLEEIMREFNSYKQRVKYVEDKVVDPLPPYLKGLDDLMSGLGAAGKAVGVAIGAVGGAVASVVEGVATFLKNPFGAFTIILVAIAVVIIIYLIYTRQRRLCMQPLQNLFPYLVSADGTTVTSGNTKDTSLQAPPSYEESVYNSGRKGPGPPSSDASTAAPPYTNEQAYQMLLALVRLDAEQRAQQNGTDSLDGQTGTQDKGQKPNLLDRLRHRKNGYRHLKDSDEEENV

SEQ ID NO: 42 - protein, 907 aa, Artificial Sequence
  Synthetic amino acid sequence: gB-041 K691L
MESRIWCLVVCVNLCIVCLGAAVSSSSTRGTSATHSHHSSHTTSAAHSRSGSVSQRVTSSQTVSHGVNETIYNTTLKYGDVVGVNTTKYPYRVCSMAQGTDLIRFERNIVCTSMKPINEDLDEGIMVVYKRNIVAHTFKVRVYQKVLTFRRSYAYIHTTYLLGSNTEYVAPPMWEIHHINSHSQCYSSYSRVIAGTVFVAYHRDSYENKTMQLMPDDYSNTHSTRYVTVKDQWHSRGSTWLYRETCNLNCMVTITTARSKYPYHFFATSTGDVVDISPFYNGTNRNASYFGENADKFFIFPNYTIVSDFGRPNSALETHRLVAFLERADSVISWDIQDEKNVTCQLTFWEASERTIRSEAEDSYHFSSAKMTATFLSKKQEVNMSDSALDCVRDEAINKLQQIFNTSYNQTYEKYGNVSVFETTGGLVVFWQGIKQKSLVELERLANRSSLNLTHNRTKRSTDGNNATHLSNMESVHNLVYAQLQFTYDTLRGYINRALAQIAEAWCVDQRRTLEVFKELSKINPSAILSAIYNKPIAARFMGDVLGLASCVTINQTSVKVLRDMNVKESPGRCYSRPVVIFNFANSSYVQYGQLGEDNEILLGNHRTEECQLPSLKIFIAGNSAYEYVDYLFKRMIDLSSISTVDSMIALDIDPLENTDFRVLELYSQKELRSSNVFDLEEIMREFNSYLQRVKYVEDKVVDPLPPYLKGLDDLMSGLGAAGKAVGVAIGAVGGAVASVVEGVATFLKNPFGAFTIILVAIAVVIIIYLIYTRQRRLCMQPLQNLFPYLVSADGTTVTSGNTKDTSLQAPPSYEESVYNSGRKGPGPPSSDASTAAPPYTNEQAYQMLLALVRLDAEQRAQQNGTDSLDGQTGTQDKGQKPNLLDRLRHRKNGYRHLKDSDEEENV

SEQ ID NO: 43 - protein, 907 aa, Artificial Sequence
  Synthetic amino acid sequence: gB-042 K691F
MESRIWCLVVCVNLCIVCLGAAVSSSSTRGTSATHSHHSSHTTSAAHSRSGSVSQRVTSSQTVSHGVNETIYNTTLKYGDVVGVNTTKYPYRVCSMAQGTDLIRFERNIVCTSMKPINEDLDEGIMVVYKRNIVAHTFKVRVYQKVLTFRRSYAYIHTTYLLGSNTEYVAPPMWEIHHINSHSQCYSSYSRVIAGTVFVAYHRDSYENKTMQLMPDDYSNTHSTRYVTVKDQWHSRGSTWLYRETCNLNCMVTITTARSKYPYHFFATSTGDVVDISPFYNGTNRNASYFGENADKFFIFPNYTIVSDFGRPNSALETHRLVAFLERADSVISWDIQDEKNVTCQLTFWEASERTIRSEAEDSYHFSSAKMTATFLSKKQEVNMSDSALDCVRDEAINKLQQIFNTSYNQTYEKYGNVSVFETTGGLVVFWQGIKQKSLVELERLANRSSLNLTHNRTKRSTDGNNATHLSNMESVHNLVYAQLQFTYDTLRGYINRALAQIAEAWCVDQRRTLEVFKELSKINPSAILSAIYNKPIAARFMGDVLGLASCVTINQTSVKVLRDMNVKESPGRCYSRPVVIFNFANSSYVQYGQLGEDNEILLGNHRTEECQLPSLKIFIAGNSAYEYVDYLFKRMIDLSSISTVDSMIALDIDPLENTDFRVLELYSQKELRSSNVFDLEEIMREFNSYFQRVKYVEDKVVDPLPPYLKGLDDLMSGLGAAGKAVGVAIGAVGGAVASVVEGVATFLKNPFGAFTIILVAIAVVIIIYLIYTRQRRLCMQPLQNLFPYLVSADGTTVTSGNTKDTSLQAPPSYEESVYNSGRKGPGPPSSDASTAAPPYTNEQAYQMLLALVRLDAEQRAQQNGTDSLDGQTGTQDKGQKPNLLDRLRHRKNGYRHLKDSDEEENV

SEQ ID NO: 44 - protein, 630 aa, Human cytomegalovirus
YGDVVGVNTTKYPYRVCSMAQGTDLIRFERNIICTSMKPINEDLDEGIMVVYKRNIVAHTFKVRVYQKVLTFRRSYAGHRTTYLLGSNTEYVAPPMWEIHHINKFAQCYSSYSRVIGGTVFVAYHRDSHENKTMQLIPDDYSNTHSTRYVTVKDQWHSRGSTATHRETCNLNCMLTITTARSKYPYHFFATSTGDVVYISPFYNGTNRNASYFGENADKFFIFPNYTIVSDFGRPNAAPETHRLVAFLERADSVISWDIQDEKNVTCQLTFWEASERTIRSEAEDSYHFSSAKMTATFLSKKQEVNMSDSALDCVRDEAINKLQQIFNTSYNQTYEKYGNVSVFETSGGLVVFWQGIKQKSLVELERLANRSSLNITHDDDDKSTSDNNTTHLSSMESVHNLVYAQLQFTYDTLRGYINRALAQIAEAWCVDQRRTLEVFKELSKINPSAILSAIYNKPIAARFMGDVLGLASCVTINQTSVKVLRDMNVKESPGRCYSRPVVIFNFANSSYVQYGQLGEDNEILLGNHRTEECQLPSLKIFIAGNSAYEYVDYLFKRMIDLSSISTVDSMIALDIDPLENTDFRVLELYSQKELRSSNVFDLEEIMREFNSYKQRVKYVEDKVVDPLPP

SEQ ID NO: 45 - protein, 705 aa, Artificial Sequence
  Synthetic sequence: gB705
MESRIWCLVVCVNLCIVCLGAVVSSSSTSHATSSAHNGSHTSRTTSAQTRSVSSQHVTSSEAVSHRANETIYNTTLKYGDVVGVNTTKYPYRVCSMAQGTDLIRFERNIVCTPMKPINEDLDEGIMVVYKRNIVAHTFKVRVYQKVLTFRRSYAGHRTTYLLGSNTEYVAPPMWEIHHINRHSQCYSSYSRVIAGTVFVAYHRDSYENKTMQLMLDDYSNTHSTRYVTVKDQWHSRGSTALYRETCNLNCMVTITTARSKYPYHFFATSTGDVVDISPFYNGTNRNTSYFGENADKFFIFPNYTIVSDFGRANSAPETHRLVAFLERADSVISWDIQDEKNVTCQLTFWEASERTIRSEAEDSYHFSSAKMTATFLSKKQEVNMSDPVLDCVRDQALNKLQQIFNASYNQTYEKYGNVSVFETTGGLVVFWQGIKQKSLLELERLANSSGVNSTRATKASTGNTTTLSLESESVRNVLYAQLQFTYDTLRSYINRALAQIAEAWCVDQRRTLEVFKELSKINPSAILSAIYNKPIAARFMGDVLGLASCVTINQTSVKVLRDMNVKESPGRCYSRPVVIFNFVNSSYVQYGQLGEDNEILLGNHRTEECQFPSLKIFIAGNSAYEYVDYLFKRMIDLSSISTVDSMIALDIDPLENTDFRVLELYSQKELRSSNVFDLEEIMREFNSYKQRVKYVEDKVVDPLPP

SEQ ID NO: 46 - protein, 907 aa, Human cytomegalovirus
MESRIWCLVVCVNLCIVCLGAAVSSSSTRGTSATHSHHSSHTTSAAHSRSGSVSQRVTSSQTVSHGVNETIYNTTLKYGDVVGVNTTKYPYRVCSMAQGTDLIRFERNIVCTSMKPINEDLDEGIMVVYKRNIVAHTFKVRVYQKVLTFRRSYAYIHTTYLLGSNTEYVAPPMWEIHHINSHSQCYSSYSRVIAGTVFVAYHRDSYENKTMQLMPDDYSNTHSTRYVTVKDQWHSRGSTWLYRETCNLNCMVTITTARSKYPYHFFATSTGDVVDISPFYNGTNRNASYFGENADKFFIFPNYTIVSDFGRPNSALETHRLVAFLERADSVISWDIQDEKNVTCQLTFWEASERTIRSEAEDSYHFSSAKMTATFLSKKQEVNMSDSALDCVRDEAINKLQQIFNTSYNQTYEKYGNVSVFETTGGLVVFWQGIKQKSLVELERLANRSSLNLTHNRTKRSTDGNNATHLSNMESVHNLVYAQLQFTYDTLRGYINRALAQIAEAWCVDQRRTLEVFKELSKINPSAILSAIYNKPIAARFMGDVLGLASCVTINQTSVKVLRDMNVKESPGRCYSRPVVIFNFANSSYVQYGQLGEDNEILLGNHRTEECQLPSLKIFIAGNSAYEYVDYLFKRMIDLSSISTVDSMIALDIDPLENTDFRVLELYSQKELRSSNVFDLEEIMREFNSYKQRVKYVEDKVVDPLPPYLKGLDDLMSGLGAAGKAVGVAIGAVGGAVASVVEGVATFLKNPFGAFTIILVAIAVVIITYLIYTRQRRLCTQPLQNLFPYLVSADGTTVTSGSTKDTSLQAPPSYEESVYNSGRKGPGPPSSDASTAAPPYTNEQAYQMLLALARLDAEQRAQQNGTDSLDGRTGTQDKGQKPNLLDRLRHRKNGYRHLKDSDEEENV

SEQ ID NO: 47 - protein, 907 aa, Artificial Sequence
  Synthetic amino acid sequence
MESRIWCLVVCVNLCIVCLGAAVSSSSTRGTSATHSHHSSHTTSAAHSRSGSVSQRVTSSQTVSHGVNETIYNTTLKYGDVVGVNTTKYPYRVCSCAQGTDLIRFERNIVCTSMKPINEDLDEGIMVVYKRNIVAHTFKVRVYQKVLTFRRSYAYIHTTYLLGSNTEYVAPPMWEIHHINSHSQCYSSYSRVIAGTVFVAYHRDSYENKTMQLMPDDYSNTHSTRYVTVKDQWHSRGSTWLYRETCNLNCMVTITTARSKYPYHFFATSTGDVVDISPFYNGTNRNASYFGENADKFFIFPNYTIVSDFGRPNSALETHRLVAFLERADSVISWDIQDEKNVTCQLTFWEASERTIRSEAEDSYHFSSAKMTATFLSKKQEVNMSDSALDCVRDEAINKLQQIFNTSYNQTYEKYGNVSVFETTGGLVVFWQGIKQKSLVELERLANRSSLNLTHNRTKRSTDGNNATHLSNMESVHNLVYAQLQFTYDTLRGYINRALAQIAEAWCVDQRRTLEVFKELSKINPSAILSAIYNKPIAARFMGDVLGLASCVTINQTSVKVLRDMNVKESPGRCYSRPVVIFNFANSSYVQYGQLGEDNEILLGNHRTEECQLPSLKIFIAGNSAYEYVDYLFKRMIDLSSISTVDSMIALDIDPLENTCFRVLELYSQKELRSSNVFDLEEIMREFNSYKQRVKYVEDKVVDPLPPYLKGLDDLMSGLGAAGKAVGVAIGAVGGAVASVVEGVATFLKNPFGAFTIILVAIAVVIIIYLIYTRQRRLCMQPLQNLFPYLVSADGTTVTSGNTKDTSLQAPPSYEESVYNSGRKGPGPPSSDASTAAPPYTNEQAYQMLLALVRLDAEQRAQQNGTDSLDGQTGTQDKGQKPNLLDRLRHRKNGYRHLKDSDEEENV

SEQ ID NO: 48 - protein, 907 aa, Artificial Sequence
  Synthetic amino acid sequence
MESRIWCLVVCVNLCIVCLGAAVSSSSTRGTSATHSHHSSHTTSAAHSRSGSVSQRVTSSQTVSHGVNETIYNTTLKYGDVVGVNTTKYPYRVCSMACGTDLIRFERNIVCTSMKPINEDLDEGIMVVYKRNIVAHTFKVRVYQKVLTFRRSYAYIHTTYLLGSNTEYVAPPMWEIHHINSHSQCYSSYSRVIAGTVFVAYHRDSYENKTMQLMPDDYSNTHSTRYVTVKDQWHSRGSTWLYRETCNLNCMVTITTARSKYPYHFFATSTGDVVDISPFYNGTNRNASYFGENADKFFIFPNYTIVSDFGRPNSALETHRLVAFLERADSVISWDIQDEKNVTCQLTFWEASERTIRSEAEDSYHFSSAKMTATFLSKKQEVNMSDSALDCVRDEAINKLQQIFNTSYNQTYEKYGNVSVFETTGGLVVFWQGIKQKSLVELERLANRSSLNLTHNRTKRSTDGNNATHLSNMESVHNLVYAQLQFTYDTLRGYINRALAQIAEAWCVDQRRTLEVFKELSKINPSAILSAIYNKPIAARFMGDVLGLASCVTINQTSVKVLRDMNVKESPGRCYSRPVVIFNFANSSYVQYGQLGEDNEILLGNHRTEECQLPSLKIFIAGNSAYEYVDYLFKRMIDLSSISTVDSMIALDIDPLECTDFRVLELYSQKELRSSNVFDLEEIMREFNSYKQRVKYVEDKVVDPLPPYLKGLDDLMSGLGAAGKAVGVAIGAVGGAVASVVEGVATFLKNPFGAFTIILVAIAVVIIIYLIYTRQRRLCMQPLQNLFPYLVSADGTTVTSGNTKDTSLQAPPSYEESVYNSGRKGPGPPSSDASTAAPPYTNEQAYQMLLALVRLDAEQRAQQNGTDSLDGQTGTQDKGQKPNLLDRLRHRKNGYRHLKDSDEEENV

SEQ ID NO: 49 - protein, 907 aa, Artificial Sequence
  Synthetic amino acid sequence
MESRIWCLVVCVNLCIVCLGAAVSSSSTRGTSATHSHHSSHTTSAAHSRSGSVSQRVTSSQTVSHGVNETIYNTTLKYGDVVGVNTTKYPYRVCSMAQGCDLIRFERNIVCTSMKPINEDLDEGIMVVYKRNIVAHTFKVRVYQKVLTFRRSYAYIHTTYLLGSNTEYVAPPMWEIHHINSHSQCYSSYSRVIAGTVFVAYHRDSYENKTMQLMPDDYSNTHSTRYVTVKDQWHSRGSTWLYRETCNLNCMVTITTACSKYPYHFFATSTGDVVDISPFYNGTNRNASYFGENADKFFIFPNYTIVSDFGRPNSALETHRLVAFLERADSVISWDIQDEKNVTCQLTFWEASERTIRSEAEDSYHFSSAKMTATFLSKKQEVNMSDSALDCVRDEAINKLQQIFNTSYNQTYEKYGNVSVFETTGGLVVFWQGIKQKSLVELERLANRSSLNLTHNRTKRSTDGNNATHLSNMESVHNLVYAQLQFTYDTLRGYINRALAQIAEAWCVDQRRTLEVFKELSKINPSAILSAIYNKPIAARFMGDVLGLASCVTINQTSVKVLRDMNVKESPGRCYSRPVVIFNFANSSYVQYGQLGEDNEILLGNHRTEECQLPSLKIFIAGNSAYEYVDYLFKRMIDLSSISTVDSMIALDIDPLENTDFRVLELYSQKELRSSNVFDLEEIMREFNSYKQRVKYVEDKVVDPLPPYLKGLDDLMSGLGAAGKAVGVAIGAVGGAVASVVEGVATFLKNPFGAFTIILVAIAVVIIIYLIYTRQRRLCMQPLQNLFPYLVSADGTTVTSGNTKDTSLQAPPSYEESVYNSGRKGPGPPSSDASTAAPPYTNEQAYQMLLALVRLDAEQRAQQNGTDSLDGQTGTQDKGQKPNLLDRLRHRKNGYRHLKDSDEEENV

SEQ ID NO: 50 - protein, 907 aa, Artificial Sequence
  Synthetic amino acid sequence
MESRIWCLVVCVNLCIVCLGAAVSSSSTRGTSATHSHHSSHTTSAAHSRSGSVSQRVTSSQTVSHGVNETIYNTTLKYGDVVGVNTTKYPYRVCSMAQGCDLIRFERNIVCTSMKPINEDLDEGIMVVYKRNIVAHTFKVRVYQKVLTFRRSYAYIHTTYLLGSNTEYVAPPMWEIHHINSHSQCYSSYSRVIAGTVFVAYHRDSYENKTMQLMPDDYSNTHSTRYVTVKDQWHSRGSTWLYRETCNLNCMVTITTARSKYPYHFFATSTGDVVDISPFYNGTNRNASYFGENADKFFIFPNYTIVSDFGRPNSALETHRLVAFLERADSVISWDIQDEKNVTCQLTFWEASERTIRSEAEDSYHFSSAKMTATFLSKKQEVNMSDSALDCVRDEAINKLQQIFNTSYNQTYEKYGNVSVFETTGGLVVFWQGIKQKSLVELERLANRSSLNLTHNRTKRSTDGNNATHLSNMESVHNLVYAQLQFTYDTLRGYINRALAQIAEAWCVDQRRTLEVFKELSKINPSAILSAIYNKPIAARFMGDVLGLASCVTINQTSVKVLRDMNVKESPGRCYSRPVVIFNFANSSYVQYGQLGEDNEILLGNHRTEECQLPSLKIFIAGNSAYEYVDYLFKRMIDLSSISTVDSMIALDIDPCENTDFRVLELYSQKELRSSNVFDLEEIMREFNSYKQRVKYVEDKVVDPLPPYLKGLDDLMSGLGAAGKAVGVAIGAVGGAVASVVEGVATFLKNPFGAFTIILVAIAVVIIIYLIYTRQRRLCMQPLQNLFPYLVSADGTTVTSGNTKDTSLQAPPSYEESVYNSGRKGPGPPSSDASTAAPPYTNEQAYQMLLALVRLDAEQRAQQNGTDSLDGQTGTQDKGQKPNLLDRLRHRKNGYRHLKDSDEEENV

SEQ ID NO: 51 - protein, 907 aa, Artificial Sequence
  Synthetic amino acid sequence
MESRIWCLVVCVNLCIVCLGAAVSSSSTRGTSATHSHHSSHTTSAAHSRSGSVSQRVTSSQTVSHGVNETIYNTTLKYGDVVGVNTTKYPYRVCSMAQGCDLIRFERNIVCTSMKPINEDLDEGIMVVYKRNIVAHTFKVRVYQKVLTFRRSYAYIHTTYLLGSNTEYVAPPMWEIHHINSHSQCYSSYSRVIAGTVFVAYHRDSYENKTMQLMPDDYSNTHSTRYVTVKDQWHSRGSTWLYRETCNLNCMVTITTARSKYPYHFFATSTGDVVDISPFYNGTNRNASYFGENADKFFIFPNYTIVSDFGRPNSALETHRLVAFLERADSVISWDIQDEKNVTCQLTFWEASERTIRSEAEDSYHFSSAKMTATFLSKKQEVNMSDSALDCVRDEAINKLQQIFNTSYNQTYEKYGNVSVFETTGGLVVFWQGIKQKSLVELERLANRSSLNLTHNRTKRSTDGNNATHLSNMESVHNLVYAQLQFTYDTLRGYINRALAQIAEAWCVDQRRTLEVFKELSKINPSAILSAIYNKPIAARFMGDVLGLASCVTINQTSVKVLRDMNVKESPGRCYSRPVVIFNFANSSYVQYGQLGEDNEILLGNHRTEECQLPSLKIFIAGNSAYEYVDYLFKRMIDLSSISTVDSMIALDIDPLECTDFRVLELYSQKELRSSNVFDLEEIMREFNSYKQRVKYVEDKVVDPLPPYLKGLDDLMSGLGAAGKAVGVAIGAVGGAVASVVEGVATFLKNPFGAFTIILVAIAVVIIIYLIYTRQRRLCMQPLQNLFPYLVSADGTTVTSGNTKDTSLQAPPSYEESVYNSGRKGPGPPSSDASTAAPPYTNEQAYQMLLALVRLDAEQRAQQNGTDSLDGQTGTQDKGQKPNLLDRLRHRKNGYRHLKDSDEEENV

SEQ ID NO: 52 - protein, 907 aa, Artificial Sequence
  Synthetic amino acid sequence
MESRIWCLVVCVNLCIVCLGAAVSSSSTRGTSATHSHHSSHTTSAAHSRSGSVSQRVTSSQTVSHGVNETIYNTTLKYGDVVGVNTTKYPYRVCSMAQGTDLIRFERNIVCTSMKPCNEDLDEGIMVVYKRNIVAHTFKVRVYQKVLTFRRSYAYIHTTYLLGSNTEYVAPPMWEIHHINSHSQCYSSYSRVIAGTVFVAYHRDSYENKTMQLMPDDYSNTHSTRYVTVKDQWHSRGSTWLYRETCNLNCMVTITTARSKYPYHFFATSTGDVVDISPFYNGTNRNASYFGENADKFFIFPNYTIVSDFGRPNSALETHRLVAFLERADSVISWDIQDEKNVTCQLTFWEASERTIRSEAEDSYHFSSAKMTATFLSKKQEVNMSDSALDCVRDEAINKLQQIFNCSYNQTYEKYGNVSVFETTGGLVVFWQGIKQKSLVELERLANRSSLNLTHNRTKRSTDGNNATHLSNMESVHNLVYAQLQFTYDTLRGYINRALAQIAEAWCVDQRRTLEVFKELSKINPSAILSAIYNKPIAARFMGDVLGLASCVTINQTSVKVLRDMNVKESPGRCYSRPVVIFNFANSSYVQYGQLGEDNEILLGNHRTEECQLPSLKIFIAGNSAYEYVDYLFKRMIDLSSISTVDSMIALDIDPLENTDFRVLELYSQKELRSSNVFDLEEIMREFNSYKQRVKYVEDKVVDPLPPYLKGLDDLMSGLGAAGKAVGVAIGAVGGAVASVVEGVATFLKNPFGAFTIILVAIAVVIIIYLIYTRQRRLCMQPLQNLFPYLVSADGTTVTSGNTKDTSLQAPPSYEESVYNSGRKGPGPPSSDASTAAPPYTNEQAYQMLLALVRLDAEQRAQQNGTDSLDGQTGTQDKGQKPNLLDRLRHRKNGYRHLKDSDEEENV

SEQ ID NO: 53 - protein, 907 aa, Artificial Sequence
  Synthetic amino acid sequence
MESRIWCLVVCVNLCIVCLGAAVSSSSTRGTSATHSHHSSHTTSAAHSRSGSVSQRVTSSQTVSHGVNETIYNTTLKYGDVVGVNTTKYPYRVCSMAQGTDLIRFERNIVCTSMKPCNEDLDEGIMVVYKRNIVAHTFKVRVYQKVLTFRRSYAYIHTTYLLGSNTEYVAPPMWEIHHINSHSQCYSSYSRVIAGTVFVAYHRDSYENKTMQLMPDDYSNTHSTRYVTVKDQWHSRGSTWLYRETCNLNCMVTITTARSKYPYHFFATSTGDVVDISPFYNGTNRNASYFGENADKFFIFPNYTIVSDFGRPNSALETHRLVAFLERADSVISWDIQDEKNVTCQLTFWEASERTIRSEAEDSYHFSSAKMTATFLSKKQEVNMSDSALDCVRDEAINKLQQIFNTCYNQTYEKYGNVSVFETTGGLVVFWQGIKQKSLVELERLANRSSLNLTHNRTKRSTDGNNATHLSNMESVHNLVYAQLQFTYDTLRGYINRALAQIAEAWCVDQRRTLEVFKELSKINPSAILSAIYNKPIAARFMGDVLGLASCVTINQTSVKVLRDMNVKESPGRCYSRPVVIFNFANSSYVQYGQLGEDNEILLGNHRTEECQLPSLKIFIAGNSAYEYVDYLFKRMIDLSSISTVDSMIALDIDPLENTDFRVLELYSQKELRSSNVFDLEEIMREFNSYKQRVKYVEDKVVDPLPPYLKGLDDLMSGLGAAGKAVGVAIGAVGGAVASVVEGVATFLKNPFGAFTIILVAIAVVIIIYLIYTRQRRLCMQPLQNLFPYLVSADGTTVTSGNTKDTSLQAPPSYEESVYNSGRKGPGPPSSDASTAAPPYTNEQAYQMLLALVRLDAEQRAQQNGTDSLDGQTGTQDKGQKPNLLDRLRHRKNGYRHLKDSDEEENV

SEQ ID NO: 54 - protein, 907 aa, Artificial Sequence
  Synthetic amino acid sequence
MESRIWCLVVCVNLCIVCLGAAVSSSSTRGTSATHSHHSSHTTSAAHSRSGSVSQRVTSSQTVSHGVNETIYNTTLKYGDVVGVNTTKYPYRVCSMAQGTDLIRFERNIVCTSMKPINEDLDEGIMVVYKRNIVAHTFKVRVYQKVLTFRRSCAYIHTTYLLGSNTEYVAPPMWEIHHINSHSQCYSSYSRVIAGTVFVAYHRDSYENKTMQLMPDDYSNTHSTRYVTVKDQWHSRGSTWLYRETCNLNCMVTITTARSKYPYHFFATSTGDVVDISPFYNGTNRNASYFGENADKFFIFPNYTIVSDFGRPNSALETHRLVAFLERADSVISWDIQDEKNVTCQLTFWEASERTIRSEAEDSYHFSSAKMTATFLSKKQEVNMSDSALDCVRDEAINKLQQIFNTSYNQTYEKYGNVSVFETTGGLVVFWQGIKQKSLVELERLANRSSLNLTHNRTKRSTDGNNATHLSNMESVHNLVYAQLQFTYDTLRGYINRALAQIAEAWCVDQRRTLEVFKELSKINPSAILSAIYNKPIAARFMGDVLGLASCVTINQTSVKVLRDMNVKESPGRCYSRPVVIFNFANSSYVQYGQLGEDNEILLGNHRTEECQLPSLKIFIAGNSAYEYVDYLFKRMIDLSSISTVDSMIALDIDPLENTDFRVLELYSQKELRSSNVFDLEEIMREFNSYKQRVKYVEDKVVDPLPPYLKGCDDLMSGLGAAGKAVGVAIGAVGGAVASVVEGVATFLKNPFGAFTIILVAIAVVIIIYLIYTRQRRLCMQPLQNLFPYLVSADGTTVTSGNTKDTSLQAPPSYEESVYNSGRKGPGPPSSDASTAAPPYTNEQAYQMLLALVRLDAEQRAQQNGTDSLDGQTGTQDKGQKPNLLDRLRHRKNGYRHLKDSDEEENV

SEQ ID NO: 55 - protein, 907 aa, Artificial Sequence
  Synthetic amino acid sequence
MESRIWCLVVCVNLCIVCLGAAVSSSSTRGTSATHSHHSSHTTSAAHSRSGSVSQRVTSSQTVSHGVNETIYNTTLKYGDVVGVNTTKYPYRVCSMAQGTDLIRFERNIVCTSMKPINEDLDEGIMVVYKRNIVAHTFKVRVYQKVLTFRRSYAYIHTTYLCGSNTEYVAPPMWEIHHINSHSQCYSSYSRVIAGTVFVAYHRDSYENKTMQLMPDDYSNTHSTRYVTVKDQWHSRGSTWLYRETCNLNCMVTITTARSKYPYHFFATSTGDVVDISPFYNGTNRNASYFGENADKFFIFPNYTIVSDFGRPNSALETHRLVAFLERADSVISWDIQDEKNVTCQLTFWEASERTIRSEAEDSYHFSSAKMTATFLSKKQEVNMSDSALDCVRDEAINKLQQIFNTSYNQTYEKYGNVSVFETTGGLVVFWQGIKQKSLVELERLANRSSLNLTHNRTKRSTDGNNATHLSNMESVHNLVYAQLQFTYDTLRGYINRALAQIAEAWCVDQRRTLEVFKELSKINPSAILSAIYNKPIAARFMGDVLGLASCVTINQTSVKVLRDMNVKESPGRCYSRPVVIFNFANSSYVQYGQLGEDNEILLGNHRTEECQLPSLKIFIAGNSAYEYVDYLFKRMIDLSSISTVDSMIALDIDPLENTDFRVLELYSQKELRSSNVFDLEEIMREFNSYKQRVKYVEDKVVDPLPPYLKGLDDLCSGLGAAGKAVGVAIGAVGGAVASVVEGVATFLKNPFGAFTIILVAIAVVIIIYLIYTRQRRLCMQPLQNLFPYLVSADGTTVTSGNTKDTSLQAPPSYEESVYNSGRKGPGPPSSDASTAAPPYTNEQAYQMLLALVRLDAEQRAQQNGTDSLDGQTGTQDKGQKPNLLDRLRHRKNGYRHLKDSDEEENV

SEQ ID NO: 56 - protein, 907 aa, Artificial Sequence
  Synthetic amino acid sequence
MESRIWCLVVCVNLCIVCLGAAVSSSSTRGTSATHSHHSSHTTSAAHSRSGSVSQRVTSSQTVSHGVNETIYNTTLKYGDVVGVNTTKYPYRVCSMAQGTDLIRFERNIVCTSMKPINEDLDEGIMVVYKRNIVAHTFKVRVYQKVLTFRRSYAYIHTTYLLGSNTEYVAPPMWEIHHINSHSQCYSSYSRVIAGTVFVAYHRDSYENKTMQLMPDCYSNTHSTRYVTVKDQWHSRGSTWLYRETCNLNCMVTITTARSKYPYHFFATSTGDVVDISPFYNGTNRNASYFGENADKFFIFPNYTIVSDFGRPNSALETHRLVAFLERADSVISWDIQDEKNVTCQLTFWEASERTIRSEAEDSYHFSSAKMTATFLSKKQEVNMSDSALDCVRDEAINKLQQIFNTSYNQTYEKYGNVSVFETTGGLVVFWQGIKQKSLVELERLANRSSLNLTHNRTKRSTDGNNATHLSNMESVHNLVYAQLQFTYDTLRGYINRALAQIAEAWCVDQRRTLEVFKELSKINPSAILSAIYNKPIAARFMGDVLGLASCVTINQTSVKVLRDMNVKESPGRCYSRPVVIFNFANCSYVQYGQLGEDNEILLGNHRTEECQLPSLKIFIAGNSAYEYVDYLFKRMIDLSSISTVDSMIALDIDPLENTDFRVLELYSQKELRSSNVFDLEEIMREFNSYKQRVKYVEDKVVDPLPPYLKGLDDLMSGLGAAGKAVGVAIGAVGGAVASVVEGVATFLKNPFGAFTIILVAIAVVIIIYLIYTRQRRLCMQPLQNLFPYLVSADGTTVTSGNTKDTSLQAPPSYEESVYNSGRKGPGPPSSDASTAAPPYTNEQAYQMLLALVRLDAEQRAQQNGTDSLDGQTGTQDKGQKPNLLDRLRHRKNGYRHLKDSDEEENV

SEQ ID NO: 57 - protein, 907 aa, Artificial Sequence
  Synthetic amino acid sequence
MESRIWCLVVCVNLCIVCLGAAVSSSSTRGTSATHSHHSSHTTSAAHSRSGSVSQRVTSSQTVSHGVNETIYNTTLKYGDVVGVNTTKYPYRVCSMAQGTDLIRFERNIVCTSMKPINEDLDEGIMVVYKRNIVAHTFKVRVYQKVLTFRRSYAYIHTTYLLGSNTEYVAPPMWEIHHINSHSQCYSSYSRVIAGTVFVAYHRDSYENKTMQLMPDCYSNTHSTRYVTVKDQWHSRGSTWLYRETCNLNCMVTITTARSKYPYHFFATSTGDVVDISPFYNGTNRNASYFGENADKFFIFPNYTIVSDFGRPNSALETHRLVAFLERADSVISWDIQDEKNVTCQLTFWEASERTIRSEAEDSYHFSSAKMTATFLSKKQEVNMSDSALDCVRDEAINKLQQIFNTSYNQTYEKYGNVSVFETTGGLVVFWQGIKQKSLVELERLANRSSLNLTHNRTKRSTDGNNATHLSNMESVHNLVYAQLQFTYDTLRGYINRALAQIAEAWCVDQRRTLEVFKELSKINPSAILSAIYNKPIAARFMGDVLGLASCVTINQTSVKVLRDMNVKESPGRCYSRPVVIFNFANSSCVQYGQLGEDNEILLGNHRTEECQLPSLKIFIAGNSAYEYVDYLFKRMIDLSSISTVDSMIALDIDPLENTDFRVLELYSQKELRSSNVFDLEEIMREFNSYKQRVKYVEDKVVDPLPPYLKGLDDLMSGLGAAGKAVGVAIGAVGGAVASVVEGVATFLKNPFGAFTIILVAIAVVIIIYLIYTRQRRLCMQPLQNLFPYLVSADGTTVTSGNTKDTSLQAPPSYEESVYNSGRKGPGPPSSDASTAAPPYTNEQAYQMLLALVRLDAEQRAQQNGTDSLDGQTGTQDKGQKPNLLDRLRHRKNGYRHLKDSDEEENV

SEQ ID NO: 58 - protein, 907 aa, Artificial Sequence
  Synthetic amino acid sequence
MESRIWCLVVCVNLCIVCLGAAVSSSSTRGTSATHSHHSSHTTSAAHSRSGSVSQRVTSSQTVSHGVNETIYNTTLKYGDVVGVNTTKYPYRVCSMAQGTDLIRFERNIVCTSMKPINEDLDEGIMVVYKRNIVAHTFKVRVYQKVLTFRRSYAYIHTTYLLGSNTEYVAPPMWEIHHINSHSQCYSSYSRVIAGTVFVAYHRDSYENKTMQLMPDDYCNTHSTRYVTVKDQWHSRGSTWLYRETCNLNCMVTITTARSKYPYHFFATSTGDVVDISPFYNGTNRNASYFGENADKFFIFPNYTIVSDFGRPNSALETHRLVAFLERADSVISWDIQDEKNVTCQLTFWEASERTIRSEAEDSYHFSSAKMTATFLSKKQEVNMSDSALDCVRDEAINKLQQIFNTSYNQTYEKYGNVSVFETTGGLVVFWQGIKQKSLVELERLANRSSLNLTHNRTKRSTDGNNATHLSNMESVHNLVYAQLQFTYDTLRGYINRALAQIAEAWCVDQRRTLEVFKELSKINPSAILSAIYNKPIAARFMGDVLGLASCVTINQTSVKVLRDMNVKESPGRCYSRPVVIFNCANSSYVQYGQLGEDNEILLGNHRTEECQLPSLKIFIAGNSAYEYVDYLFKRMIDLSSISTVDSMIALDIDPLENTDFRVLELYSQKELRSSNVFDLEEIMREFNSYKQRVKYVEDKVVDPLPPYLKGLDDLMSGLGAAGKAVGVAIGAVGGAVASVVEGVATFLKNPFGAFTIILVAIAVVIIIYLIYTRQRRLCMQPLQNLFPYLVSADGTTVTSGNTKDTSLQAPPSYEESVYNSGRKGPGPPSSDASTAAPPYTNEQAYQMLLALVRLDAEQRAQQNGTDSLDGQTGTQDKGQKPNLLDRLRHRKNGYRHLKDSDEEENV

SEQ ID NO: 59 - protein, 907 aa, Artificial Sequence
  Synthetic amino acid sequence
MESRIWCLVVCVNLCIVCLGAAVSSSSTRGTSATHSHHSSHTTSAAHSRSGSVSQRVTSSQTVSHGVNETIYNTTLKYGDVVGVNTTKYPYRVCSMAQGTDLIRFERNIVCTSMKPINEDLDEGIMVVYKRNIVAHTFKVRVYQKVLTFRRSYAYIHTTYLLGSNTEYVAPPMWEIHHINSHSQCYSSYSRVIAGTVFVAYHRDSYENKTMQLMPDDYCNTHSTRYVTVKDQWHSRGSTWLYRETCNLNCMVTITTARSKYPYHFFATSTGDVVDISPFYNGTNRNASYFGENADKFFIFPNYTIVSDFGRPNSALETHRLVAFLERADSVISWDIQDEKNVTCQLTFWEASERTIRSEAEDSYHFSSAKMTATFLSKKQEVNMSDSALDCVRDEAINKLQQIFNTSYNQTYEKYGNVSVFETTGGLVVFWQGIKQKSLVELERLANRSSLNLTHNRTKRSTDGNNATHLSNMESVHNLVYAQLQFTYDTLRGYINRALAQIAEAWCVDQRRTLEVFKELSKINPSAILSAIYNKPIAARFMGDVLGLASCVTINQTSVKVLRDMNVKESPGRCYSRPVVIFNFCNSSYVQYGQLGEDNEILLGNHRTEECQLPSLKIFIAGNSAYEYVDYLFKRMIDLSSISTVDSMIALDIDPLENTDFRVLELYSQKELRSSNVFDLEEIMREFNSYKQRVKYVEDKVVDPLPPYLKGLDDLMSGLGAAGKAVGVAIGAVGGAVASVVEGVATFLKNPFGAFTIILVAIAVVIIIYLIYTRQRRLCMQPLQNLFPYLVSADGTTVTSGNTKDTSLQAPPSYEESVYNSGRKGPGPPSSDASTAAPPYTNEQAYQMLLALVRLDAEQRAQQNGTDSLDGQTGTQDKGQKPNLLDRLRHRKNGYRHLKDSDEEENV

SEQ ID NO: 60 - protein, 907 aa, Artificial Sequence
  Synthetic amino acid sequence
MESRIWCLVVCVNLCIVCLGAAVSSSSTRGTSATHSHHSSHTTSAAHSRSGSVSQRVTSSQTVSHGVNETIYNTTLKYGDVVGVNTTKYPYRVCSMAQGTDLIRFERNIVCTSMKPINEDLDEGIMVVYKRNIVAHTFKVRVYQKVLTFRRSYAYIHTTYLLGSNTEYVAPPMWEIHHINSHSQCYSSYSRVIAGTVFVAYHRDSYENKTMQLMPDDYCNTHSTRYVTVKDQWHSRGSTWLYRETCNLNCMVTITTARSKYPYHFFATSTGDVVDISPFYNGTNRNASYFGENADKFFIFPNYTIVSDFGRPNSALETHRLVAFLERADSVISWDIQDEKNVTCQLTFWEASERTIRSEAEDSYHFSSAKMTATFLSKKQEVNMSDSALDCVRDEAINKLQQIFNTSYNQTYEKYGNVSVFETTGGLVVFWQGIKQKSLVELERLANRSSLNLTHNRTKRSTDGNNATHLSNMESVHNLVYAQLQFTYDTLRGYINRALAQIAEAWCVDQRRTLEVFKELSKINPSAILSAIYNKPIAARFMGDVLGLASCVTINQTSVKVLRDMNVKESPGRCYSRPVVIFNFACSSYVQYGQLGEDNEILLGNHRTEECQLPSLKIFIAGNSAYEYVDYLFKRMIDLSSISTVDSMIALDIDPLENTDFRVLELYSQKELRSSNVFDLEEIMREFNSYKQRVKYVEDKVVDPLPPYLKGLDDLMSGLGAAGKAVGVAIGAVGGAVASVVEGVATFLKNPFGAFTIILVAIAVVIIIYLIYTRQRRLCMQPLQNLFPYLVSADGTTVTSGNTKDTSLQAPPSYEESVYNSGRKGPGPPSSDASTAAPPYTNEQAYQMLLALVRLDAEQRAQQNGTDSLDGQTGTQDKGQKPNLLDRLRHRKNGYRHLKDSDEEENV

SEQ ID NO: 61 - protein, 907 aa, Artificial Sequence
  Synthetic amino acid sequence
MESRIWCLVVCVNLCIVCLGAAVSSSSTRGTSATHSHHSSHTTSAAHSRSGSVSQRVTSSQTVSHGVNETIYNTTLKYGDVVGVNTTKYPYRVCSMAQGTDLIRFERNIVCTSMKPINEDLDEGIMVVYKRNIVAHTFKVRVYQKVLTFRRSYAYIHTTYLLGSNTEYVAPPMWEIHHINSHSQCYSSYSRVIAGTVFVAYHRDSYENKTMQLMPDDYSCTHSTRYVTVKDQWHSRGSTWLYRETCNLNCMVTITTARSKYPYHFFATSTGDVVDISPFYNGTNRNASYFGENADKFFIFPNYTIVSDFGRPNSALETHRLVAFLERADSVISWDIQDEKNVTCQLTFWEASERTIRSEAEDSYHFSSAKMTATFLSKKQEVNMSDSALDCVRDEAINKLQQIFNTSYNQTYEKYGNVSVFETTGGLVVFWQGIKQKSLVELERLANRSSLNLTHNRTKRSTDGNNATHLSNMESVHNLVYAQLQFTYDTLRGYINRALAQIAEAWCVDQRRTLEVFKELSKINPSAILSAIYNKPIAARFMGDVLGLASCVTINQTSVKVLRDMNVKESPGRCYSRPVVIFNFANSSYVQYGQLGEDNEILLGNHRTEECQLPSLKIFIAGNSAYEYVDYLFKRMIDLSSISTVDSMIALDIDPLENCDFRVLELYSQKELRSSNVFDLEEIMREFNSYKQRVKYVEDKVVDPLPPYLKGLDDLMSGLGAAGKAVGVAIGAVGGAVASVVEGVATFLKNPFGAFTIILVAIAVVIIIYLIYTRQRRLCMQPLQNLFPYLVSADGTTVTSGNTKDTSLQAPPSYEESVYNSGRKGPGPPSSDASTAAPPYTNEQAYQMLLALVRLDAEQRAQQNGTDSLDGQTGTQDKGQKPNLLDRLRHRKNGYRHLKDSDEEENV

SEQ ID NO: 62 - protein, 907 aa, Artificial Sequence
  Synthetic amino acid sequence
MESRIWCLVVCVNLCIVCLGAAVSSSSTRGTSATHSHHSSHTTSAAHSRSGSVSQRVTSSQTVSHGVNETIYNTTLKYGDVVGVNTTKYPYRVCSMAQGTDLIRFERNIVCTSMKPINEDLDEGIMVVYKRNIVAHTFKVRVYQKVLTFRRSYAYIHTTYLLGSNTEYVAPPMWEIHHINSHSQCYSSYSRVIAGTVFVAYHRDSYENKTMQLMPDDYSNTHCTRYVTVKDQWHSRGSTWLYRETCNLNCMVTITTARSKYPYHFFATSTGDVVDISPFYNGTNRNASYFGENADKFFIFPNYTIVSDFGRPNSALETHRLVAFLERADSVISWDIQDEKNVTCQLTFWEASERTIRSEAEDSYHFSSAKMTATFLSKKQEVNMSDSALDCVRDEAINKLQQIFNTSYNQTYEKYGNVSVFETTGGLVVFWQGIKQKSLVELERLANRSSLNLTHNRTKRSTDGNNATHLSNMESVHNLVYAQLQFTYDTLRGYINRALAQIAEAWCVDQRRTLEVFKELSKINPSAILSAIYNKPIAARFMGDVLGLASCVTINQTSVKVLRDMNVKESPGRCYSRPVVIFNFANSSYVQYGQLGEDNEILLGNHRTEECQLPSLKIFIAGNSAYEYVDYLFKRMIDLSSISTVDSMIALDIDPLENCDFRVLELYSQKELRSSNVFDLEEIMREFNSYKQRVKYVEDKVVDPLPPYLKGLDDLMSGLGAAGKAVGVAIGAVGGAVASVVEGVATFLKNPFGAFTIILVAIAVVIIIYLIYTRQRRLCMQPLQNLFPYLVSADGTTVTSGNTKDTSLQAPPSYEESVYNSGRKGPGPPSSDASTAAPPYTNEQAYQMLLALVRLDAEQRAQQNGTDSLDGQTGTQDKGQKPNLLDRLRHRKNGYRHLKDSDEEENV

SEQ ID NO: 63 - protein, 907 aa, Artificial Sequence
  Synthetic amino acid sequence
MESRIWCLVVCVNLCIVCLGAAVSSSSTRGTSATHSHHSSHTTSAAHSRSGSVSQRVTSSQTVSHGVNETIYNTTLKYGDVVGVNTTKYPYRVCSMAQGTDLIRFERNIVCTSMKPINEDLDEGIMVVYKRNIVAHTFKVRVYQKVLTFRRSYAYIHTTYLLGSNTEYVAPPMWEIHHINSHSQCYSSYSRVIAGTVFVAYHRDSYENKTMQLMPDDYSNTHSTRYVTVKDQWHSRGSTCLYRETCNLNCMVTITTARSKYPYHFFATSTGDVVDISPFYNGTNRNASYFGENADKFFIFPNYTIVSDFGRPNSALETHRLVAFLERADSVISWDIQDEKNVTCQLTFWEASERTIRSEAEDSYHFSSAKMTATFLSKKQEVNMSDSALDCVRDEAINKLQQIFNTSYNQTYEKYGNVSVFETTGGLVVFWQGIKQKSLVELERLANRSSLNLTHNRTKRSTDGNNATHLSNMESVHNLVYAQLQFTYDTLRGYINRALAQIAEAWCVDQRRTLEVFKELSKINPSAILSAIYNKPIAARFMGDVLGLASCVTINQTSVKVLRDMNVKESPGRCYSRPVVIFNFANSSYVQYGQLGEDNEILLGNHRTEECQLPSLKIFIAGNSAYEYVDYLFKRMIDLSSISTVDSMIALDIDPLENTDFRVLELYSQKELRSSNVFDLEEIMREFNSYKQRVKYVEDKVVDPLPPYLKGLDDLMSGLGAAGKAVGVAIGCVGGAVASVVEGVATFLKNPFGAFTIILVAIAVVIIIYLIYTRQRRLCMQPLQNLFPYLVSADGTTVTSGNTKDTSLQAPPSYEESVYNSGRKGPGPPSSDASTAAPPYTNEQAYQMLLALVRLDAEQRAQQNGTDSLDGQTGTQDKGQKPNLLDRLRHRKNGYRHLKDSDEEENV

SEQ ID NO: 64 - protein, 907 aa, Artificial Sequence
  Synthetic amino acid sequence
MESRIWCLVVCVNLCIVCLGAAVSSSSTRGTSATHSHHSSHTTSAAHSRSGSVSQRVTSSQTVSHGVNETIYNTTLKYGDVVGVNTTKYPYRVCSMAQGTDLIRFERNIVCTSMKPINEDLDEGIMVVYKRNIVAHTFKVRVYQKVLTFRRSYAYIHTTYLLGSNTEYVAPPMWEIHHINSHSQCYSSYSRVIAGTVFVAYHRDSYENKTMQLMPDDYSNTHSTRYVTVKDQWHSRGSTCLYRETCNLNCMVTITTARSKYPYHFFATSTGDVVDISPFYNGTNRNASYFGENADKFFIFPNYTIVSDFGRPNSALETHRLVAFLERADSVISWDIQDEKNVTCQLTFWEASERTIRSEAEDSYHFSSAKMTATFLSKKQEVNMSDSALDCVRDEAINKLQQIFNTSYNQTYEKYGNVSVFETTGGLVVFWQGIKQKSLVELERLANRSSLNLTHNRTKRSTDGNNATHLSNMESVHNLVYAQLQFTYDTLRGYINRALAQIAEAWCVDQRRTLEVFKELSKINPSAILSAIYNKPIAARFMGDVLGLASCVTINQTSVKVLRDMNVKESPGRCYSRPVVIFNFANSSYVQYGQLGEDNEILLGNHRTEECQLPSLKIFIAGNSAYEYVDYLFKRMIDLSSISTVDSMIALDIDPLENTDFRVLELYSQKELRSSNVFDLEEIMREFNSYKQRVKYVEDKVVDPLPPYLKGLDDLMSGLGAAGKAVGVAIGAVGCAVASVVEGVATFLKNPFGAFTIILVAIAVVIIIYLIYTRQRRLCMQPLQNLFPYLVSADGTTVTSGNTKDTSLQAPPSYEESVYNSGRKGPGPPSSDASTAAPPYTNEQAYQMLLALVRLDAEQRAQQNGTDSLDGQTGTQDKGQKPNLLDRLRHRKNGYRHLKDSDEEENV

SEQ ID NO: 65 - protein, 907 aa, Artificial Sequence
  Synthetic amino acid sequence
MESRIWCLVVCVNLCIVCLGAAVSSSSTRGTSATHSHHSSHTTSAAHSRSGSVSQRVTSSQTVSHGVNETIYNTTLKYGDVVGVNTTKYPYRVCSMAQGTDLIRFERNIVCTSMKPINEDLDEGIMVVYKRNIVAHTFKVRVYQKVLTFRRSYAYIHTTYLLGSNTEYVAPPMWEIHHINSHSQCYSSYSRVIAGTVFVAYHRDSYENKTMQLMPDDYSNTHSTRYVTVKDQWHSRGSTWLCRETCNLNCMVTITTARSKYPYHFFATSTGDVVDISPFYNGTNRNASYFGENADKFFIFPNYTIVSDFGRPNSALETHRLVAFLERADSVISWDIQDEKNVTCQLTFWEASERTIRSEAEDSYHFSSAKMTATFLSKKQEVNMSDSALDCVRDEAINKLQQIFNTSYNQTYEKYGNVSVFETTGGLVVFWQGIKQKSLVELERLANRSSLNLTHNRTKRSTDGNNATHLSNMESVHNLVYAQLQFTYDTLRGYINRALAQIAEAWCVDQRRTLEVFKELSKINPSAILSAIYNKPIAARFMGDVLGLASCVTINQTSVKVLRDMNVKESPGRCYSRPVVIFNFANSSYVQYGQLGEDNEILLGNHRTEECQLPSLKIFIAGNSAYEYVDYLFKRMIDLSSISTVDSMIALDIDPLENTDFRVLELYSQKELRSSNVFDLEEIMREFNSYKQRVKYVEDKVVDPLPPYLKGLDDLMSGLGAAGKAVGCAIGAVGGAVASVVEGVATFLKNPFGAFTIILVAIAVVIIIYLIYTRQRRLCMQPLQNLFPYLVSADGTTVTSGNTKDTSLQAPPSYEESVYNSGRKGPGPPSSDASTAAPPYTNEQAYQMLLALVRLDAEQRAQQNGTDSLDGQTGTQDKGQKPNLLDRLRHRKNGYRHLKDSDEEENV

SEQ ID NO: 66 - protein, 907 aa, Artificial Sequence
  Synthetic amino acid sequence
MESRIWCLVVCVNLCIVCLGAAVSSSSTRGTSATHSHHSSHTTSAAHSRSGSVSQRVTSSQTVSHGVNETIYNTTLKYGDVVGVNTTKYPYRVCSMAQGTDLIRFERNIVCTSMKPINEDLDEGIMVVYKRNIVAHTFKVRVYQKVLTFRRSYAYIHTTYLLGSNTEYVAPPMWEIHHINSHSQCYSSYSRVIAGTVFVAYHRDSYENKTMQLMPDDYSNTHSTRYVTVKDQWHSRGSTWLCRETCNLNCMVTITTARSKYPYHFFATSTGDVVDISPFYNGTNRNASYFGENADKFFIFPNYTIVSDFGRPNSALETHRLVAFLERADSVISWDIQDEKNVTCQLTFWEASERTIRSEAEDSYHFSSAKMTATFLSKKQEVNMSDSALDCVRDEAINKLQQIFNTSYNQTYEKYGNVSVFETTGGLVVFWQGIKQKSLVELERLANRSSLNLTHNRTKRSTDGNNATHLSNMESVHNLVYAQLQFTYDTLRGYINRALAQIAEAWCVDQRRTLEVFKELSKINPSAILSAIYNKPIAARFMGDVLGLASCVTINQTSVKVLRDMNVKESPGRCYSRPVVIFNFANSSYVQYGQLGEDNEILLGNHRTEECQLPSLKIFIAGNSAYEYVDYLFKRMIDLSSISTVDSMIALDIDPLENTDFRVLELYSQKELRSSNVFDLEEIMREFNSYKQRVKYVEDKVVDPLPPYLKGLDDLMSGLGAAGKAVGVAICAVGGAVASVVEGVATFLKNPFGAFTIILVAIAVVIIIYLIYTRQRRLCMQPLQNLFPYLVSADGTTVTSGNTKDTSLQAPPSYEESVYNSGRKGPGPPSSDASTAAPPYTNEQAYQMLLALVRLDAEQRAQQNGTDSLDGQTGTQDKGQKPNLLDRLRHRKNGYRHLKDSDEEENV

SEQ ID NO: 67 - protein, 907 aa, Artificial Sequence
  Synthetic amino acid sequence
MESRIWCLVVCVNLCIVCLGAAVSSSSTRGTSATHSHHSSHTTSAAHSRSGSVSQRVTSSQTVSHGVNETIYNTTLKYGDVVGVNTTKYPYRVCSMAQGTDLIRFERNIVCTSMKPINEDLDEGIMVVYKRNIVAHTFKVRVYQKVLTFRRSYAYIHTTYLLGSNTEYVAPPMWEIHHINSHSQCYSSYSRVIAGTVFVAYHRDSYENKTMQLMPDDYSNTHSTRYVTVKDQWHSRGSTWLYRETCNLNCMVTITTACSKYPYHFFATSTGDVVDISPFYNGTNRNASYFGENADKFFIFPNYTIVSDFGRPNSALETHRLVAFLERADSVISWDIQDEKNVTCQLTFWEASERTIRSEAEDSYHFSSAKMTATFLSKKQEVNMSDSALDCVRDEAINKLQQIFNTSYNQTYEKYGNVSVFETTGGLVVFWQGIKQKSLVELERLANRSSLNLTHNRTKRSTDGNNATHLSNMESVHNLVYAQLQFTYDTLRGYINRALAQIAEAWCVDQRRTLEVFKELSKINPSAILSAIYNKPIAARFMGDVLGLASCVTINQTSVKVLRDMNVKESPGRCYSRPVVIFNFANSSYVQYGQLGEDNEILLGNHRTEECQLPSLKIFIAGNSAYEYVDYLFKRMIDLSSISTVDSMIALDIDPCENTDFRVLELYSQKELRSSNVFDLEEIMREFNSYKQRVKYVEDKVVDPLPPYLKGLDDLMSGLGAAGKAVGVAIGAVGGAVASVVEGVATFLKNPFGAFTIILVAIAVVIIIYLIYTRQRRLCMQPLQNLFPYLVSADGTTVTSGNTKDTSLQAPPSYEESVYNSGRKGPGPPSSDASTAAPPYTNEQAYQMLLALVRLDAEQRAQQNGTDSLDGQTGTQDKGQKPNLLDRLRHRKNGYRHLKDSDEEENV

SEQ ID NO: 68 - protein, 907 aa, Artificial Sequence
  Synthetic amino acid sequence
MESRIWCLVVCVNLCIVCLGAAVSSSSTRGTSATHSHHSSHTTSAAHSRSGSVSQRVTSSQTVSHGVNETIYNTTLKYGDVVGVNTTKYPYRVCSMAQGTDLIRFERNIVCTSMKPINEDLDEGIMVVYKRNIVAHTFKVRVYQKVLTFRRSYAYIHTTYLLGSNTEYVAPPMWEIHHINSHSQCYSSYSRVIAGTVFVAYHRDSYENKTMQLMPDDYSNTHSTRYVTVKDQWHSRGSTWLYRETCNLNCMVTITTARSKYPYHFFATCTGDVVDISPFYNGTNRNASYFGENADKFFIFPNYTIVSDFGRPNSALETHRLVAFLERADSVISWDIQDEKNVTCQLTFWEASERTIRSEAEDSYHFSSAKMTATFLSKKQEVNMSDSALDCVRDEAINKLQQIFNTSYNQTYEKYGNVSVFETTGGLVVFWQGIKQKSLVELERLANRSSLNLTHNRTKRSTDGNNATHLSNMESVHNLVYAQLQFTYDTLRGYINRALAQIAEAWCVDQRRTLEVFKELSKINPSAILSAIYNKPIAARFMGDVLGLASCVTINQTSVKVLRDMNVKESPGRCYSRPVVIFNFANSSYVQYGQLGEDNEILLGNHRTEECQLPSLKIFIAGNSAYEYVDYLFKRMIDLSSISTVDSMIALDIDPCENTDFRVLELYSQKELRSSNVFDLEEIMREFNSYKQRVKYVEDKVVDPLPPYLKGLDDLMSGLGAAGKAVGVAIGAVGGAVASVVEGVATFLKNPFGAFTIILVAIAVVIIIYLIYTRQRRLCMQPLQNLFPYLVSADGTTVTSGNTKDTSLQAPPSYEESVYNSGRKGPGPPSSDASTAAPPYTNEQAYQMLLALVRLDAEQRAQQNGTDSLDGQTGTQDKGQKPNLLDRLRHRKNGYRHLKDSDEEENV

SEQ ID NO: 69 - protein, 907 aa, Artificial Sequence
  Synthetic amino acid sequence
MESRIWCLVVCVNLCIVCLGAAVSSSSTRGTSATHSHHSSHTTSAAHSRSGSVSQRVTSSQTVSHGVNETIYNTTLKYGDVVGVNTTKYPYRVCSMAQGTDLIRFERNIVCTSMKPINEDLDEGIMVVYKRNIVAHTFKVRVYQKVLTFRRSYAYIHTTYLLGSNTEYVAPPMWEIHHINSHSQCYSSYSRVIAGTVFVAYHRDSYENKTMQLMPDDYSNTHSTRYVTVKDQWHSRGSTWLYRETCNLNCMVTITTARSKYPYHFFATCTGDVVDISPFYNGTNRNASYFGENADKFFIFPNYTIVSDFGRPNSALETHRLVAFLERADSVISWDIQDEKNVTCQLTFWEASERTIRSEAEDSYHFSSAKMTATFLSKKQEVNMSDSALDCVRDEAINKLQQIFNTSYNQTYEKYGNVSVFETTGGLVVFWQGIKQKSLVELERLANRSSLNLTHNRTKRSTDGNNATHLSNMESVHNLVYAQLQFTYDTLRGYINRALAQIAEAWCVDQRRTLEVFKELSKINPSAILSAIYNKPIAARFMGDVLGLASCVTINQTSVKVLRDMNVKESPGRCYSRPVVIFNFANSSYVQYGQLGEDNEILLGNHRTEECQLPSLKIFIAGNSAYEYVDYLFKRMIDLSSISTVDSMIALDIDPLECTDFRVLELYSQKELRSSNVFDLEEIMREFNSYKQRVKYVEDKVVDPLPPYLKGLDDLMSGLGAAGKAVGVAIGAVGGAVASVVEGVATFLKNPFGAFTIILVAIAVVIIIYLIYTRQRRLCMQPLQNLFPYLVSADGTTVTSGNTKDTSLQAPPSYEESVYNSGRKGPGPPSSDASTAAPPYTNEQAYQMLLALVRLDAEQRAQQNGTDSLDGQTGTQDKGQKPNLLDRLRHRKNGYRHLKDSDEEENV

SEQ ID NO: 70 - protein, 907 aa, Artificial Sequence
  Synthetic amino acid sequence
MESRIWCLVVCVNLCIVCLGAAVSSSSTRGTSATHSHHSSHTTSAAHSRSGSVSQRVTSSQTVSHGVNETIYNTTLKYGDVVGVNTTKYPYRVCSMAQGTDLIRFERNIVCTSMKPINEDLDEGIMVVYKRNIVAHTFKVRVYQKVLTFRRSYAYIHTTYLLGSNTEYVAPPMWEIHHINSHSQCYSSYSRVIAGTVFVAYHRDSYENKTMQLMPDDYSNTHSTRYVTVKDQWHSRGSTWLYRETCNLNCMVTITTARSKYPYHFFATSTGCVVDISPFYNGTNRNASYFGENADKFFIFPNYTIVSDFGRPNSALETHRLVAFLERADSVISWDIQDEKNVTCQLTFWEASERTIRSEAEDSYHFSSAKMTATFLSKKQEVNMSDSALDCVRDEAINKLQQIFNTSYNQTYEKYGNVSVFETTGGLVVFWQGIKQKSLVELERLANRSSLNLTHNRTKRSTDGNNATHLSNMESVHNLVYAQLQFTYDTLRGYINRALAQIAEAWCVDQRRTLEVFKELSKINPSAILSAIYNKPIAARFMGDVLGLASCVTINQTSVKVLRDMNVKESPGRCYSRPVVIFNFANSSYVQYGQLGEDNEILLGNHRTEECQLCSLKIFIAGNSAYEYVDYLFKRMIDLSSISTVDSMIALDIDPLENTDFRVLELYSQKELRSSNVFDLEEIMREFNSYKQRVKYVEDKVVDPLPPYLKGLDDLMSGLGAAGKAVGVAIGAVGGAVASVVEGVATFLKNPFGAFTIILVAIAVVIIIYLIYTRQRRLCMQPLQNLFPYLVSADGTTVTSGNTKDTSLQAPPSYEESVYNSGRKGPGPPSSDASTAAPPYTNEQAYQMLLALVRLDAEQRAQQNGTDSLDGQTGTQDKGQKPNLLDRLRHRKNGYRHLKDSDEEENV

SEQ ID NO: 71 - protein, 907 aa, Artificial Sequence
  Synthetic amino acid sequence
MESRIWCLVVCVNLCIVCLGAAVSSSSTRGTSATHSHHSSHTTSAAHSRSGSVSQRVTSSQTVSHGVNETIYNTTLKYGDVVGVNTTKYPYRVCSMAQGTDLIRFERNIVCTSMKPINEDLDEGIMVVYKRNIVAHTFKVRVYQKVLTFRRSYAYIHTTYLLGSNTEYVAPPMWEIHHINSHSQCYSSYSRVIAGTVFVAYHRDSYENKTMQLMPDDYSNTHSTRYVTVKDQWHSRGSTWLYRETCNLNCMVTITTARSKYPYHFFATSTGDCVDISPFYNGTNRNASYFGENADKFFIFPNYTIVSDFGRPNSALETHRLVAFLERADSVISWDIQDEKNVTCQLTFWEASERTIRSEAEDSYHFSSAKMTATFLSKKQEVNMSDSALDCVRDEAINKLQQIFNTSYNQTYEKYGNVSVFETTGGLVVFWQGIKQKSLVELERLANRSSLNLTHNRTKRSTDGNNATHLSNMESVHNLVYAQLQFTYDTLRGYINRALAQIAEAWCVDQRRTLEVFKELSKINPSAILSAIYNKPIAARFMGDVLGLASCVTINQTSVKVLRDMNVKESPGRCYSRPVVIFNFANSSYVQYGQLGEDNEILLGNHRTEECQLPSLKIFIAGNSAYEYCDYLFKRMIDLSSISTVDSMIALDIDPLENTDFRVLELYSQKELRSSNVFDLEEIMREFNSYKQRVKYVEDKVVDPLPPYLKGLDDLMSGLGAAGKAVGVAIGAVGGAVASVVEGVATFLKNPFGAFTIILVAIAVVIIIYLIYTRQRRLCMQPLQNLFPYLVSADGTTVTSGNTKDTSLQAPPSYEESVYNSGRKGPGPPSSDASTAAPPYTNEQAYQMLLALVRLDAEQRAQQNGTDSLDGQTGTQDKGQKPNLLDRLRHRKNGYRHLKDSDEEENV

SEQ ID NO: 72 - protein, 907 aa, Artificial Sequence
  Synthetic amino acid sequence
MESRIWCLVVCVNLCIVCLGAAVSSSSTRGTSATHSHHSSHTTSAAHSRSGSVSQRVTSSQTVSHGVNETIYNTTLKYGDVVGVNTTKYPYRVCSMAQGTDLIRFERNIVCTSMKPINEDLDEGIMVVYKRNIVAHTFKVRVYQKVLTFRRSYAYIHTTYLLGSNTEYVAPPMWEIHHINSHSQCYSSYSRVIAGTVFVAYHRDSYENKTMQLMPDDYSNTHSTRYVTVKDQWHSRGSTWLYRETCNLNCMVTITTARSKYPYHFFATSTGDVVDISPFYNGTNRNASYFGENADKFFIFPNYTIVSDFGRPNSALETHRLVAFLERADSVISWDIQDEKNVTCQLTFCEASERTIRSEAEDSYHFSSAKMTATFLSKKQEVNMSDSALDCVRDEAINKLQQIFNTSYNQTYEKYGNVSVFETTGGLVVFWQGIKQKSLVELERLANRSSLNLTHNRTKRSTDGNNATHLSNMESVHNLVYAQLQFTYDTLRGYINRALAQIAEAWCVDQRRTLEVFKELSKINPSAILSAIYNKPIAARFMGDVLGLASCVTINQTSVKVLRDMNVKESPGRCYSRPVVIFNFANSSYVQYGQLGEDNEILLGNHRTEECQLPSLKIFIAGNSAYEYVDYLFKRMIDLSSISTVDSMICLDIDPLENTDFRVLELYSQKELRSSNVFDLEEIMREFNSYKQRVKYVEDKVVDPLPPYLKGLDDLMSGLGAAGKAVGVAIGAVGGAVASVVEGVATFLKNPFGAFTIILVAIAVVIIIYLIYTRQRRLCMQPLQNLFPYLVSADGTTVTSGNTKDTSLQAPPSYEESVYNSGRKGPGPPSSDASTAAPPYTNEQAYQMLLALVRLDAEQRAQQNGTDSLDGQTGTQDKGQKPNLLDRLRHRKNGYRHLKDSDEEENV

SEQ ID NO: 73 - protein, 907 aa, Artificial Sequence
  Synthetic amino acid sequence
MESRIWCLVVCVNLCIVCLGAAVSSSSTRGTSATHSHHSSHTTSAAHSRSGSVSQRVTSSQTVSHGVNETIYNTTLKYGDVVGVNTTKYPYRVCSMAQGTDLIRFERNIVCTSMKPINEDLDEGIMVVYKRNIVAHTFKVRVYQKVLTFRRSYAYIHTTYLLGSNTEYVAPPMWEIHHINSHSQCYSSYSRVIAGTVFVAYHRDSYENKTMQLMPDDYSNTHSTRYVTVKDQWHSRGSTWLYRETCNLNCMVTITTARSKYPYHFFATSTGDVVDISPFYNGTNRNASYFGENADKFFIFPNYTIVSDFGRPNSALETHRLVAFLERADSVISWDIQDEKNVTCQLTFWEASERTIRSEAEDSYHFCSAKMTATFLSKKQEVNMSDSALDCVRDEAINKLQQIFNTSYNQTYEKYGNVSVFETTGGLVVFWQGIKQKSLVELERLANRSSLNLTHNRTKRSTDGNNATHLSNMESVHNLVYAQLQFTYDTLRGYINRALCQIAEAWCVDQRRTLEVFKELSKINPSAILSAIYNKPIAARFMGDVLGLASCVTINQTSVKVLRDMNVKESPGRCYSRPVVIFNFANSSYVQYGQLGEDNEILLGNHRTEECQLPSLKIFIAGNSAYEYVDYLFKRMIDLSSISTVDSMIALDIDPLENTDFRVLELYSQKELRSSNVFDLEEIMREFNSYKQRVKYVEDKVVDPLPPYLKGLDDLMSGLGAAGKAVGVAIGAVGGAVASVVEGVATFLKNPFGAFTIILVAIAVVIIIYLIYTRQRRLCMQPLQNLFPYLVSADGTTVTSGNTKDTSLQAPPSYEESVYNSGRKGPGPPSSDASTAAPPYTNEQAYQMLLALVRLDAEQRAQQNGTDSLDGQTGTQDKGQKPNLLDRLRHRKNGYRHLKDSDEEENV

SEQ ID NO: 74 - protein, 907 aa, Artificial Sequence
  Synthetic amino acid sequence
MESRIWCLVVCVNLCIVCLGAAVSSSSTRGTSATHSHHSSHTTSAAHSRSGSVSQRVTSSQTVSHGVNETIYNTTLKYGDVVGVNTTKYPYRVCSMAQGTDLIRFERNIVCTSMKPINEDLDEGIMVVYKRNIVAHTFKVRVYQKVLTFRRSYAYIHTTYLLGSNTEYVAPPMWEIHHINSHSQCYSSYSRVIAGTVFVAYHRDSYENKTMQLMPDDYSNTHSTRYVTVKDQWHSRGSTWLYRETCNLNCMVTITTARSKYPYHFFATSTGDVVDISPFYNGTNRNASYFGENADKFFIFPNYTIVSDFGRPNSALETHRLVAFLERADSVISWDIQDEKNVTCQLTFWEASERTIRSEAEDSYHFCSAKMTATFLSKKQEVNMSDSALDCVRDEAINKLQQIFNTSYNQTYEKYGNVSVFETTGGLVVFWQGIKQKSLVELERLANRSSLNLTHNRTKRSTDGNNATHLSNMESVHNLVYAQLQFTYDTLRGYINRALAQICEAWCVDQRRTLEVFKELSKINPSAILSAIYNKPIAARFMGDVLGLASCVTINQTSVKVLRDMNVKESPGRCYSRPVVIFNFANSSYVQYGQLGEDNEILLGNHRTEECQLPSLKIFIAGNSAYEYVDYLFKRMIDLSSISTVDSMIALDIDPLENTDFRVLELYSQKELRSSNVFDLEEIMREFNSYKQRVKYVEDKVVDPLPPYLKGLDDLMSGLGAAGKAVGVAIGAVGGAVASVVEGVATFLKNPFGAFTIILVAIAVVIIIYLIYTRQRRLCMQPLQNLFPYLVSADGTTVTSGNTKDTSLQAPPSYEESVYNSGRKGPGPPSSDASTAAPPYTNEQAYQMLLALVRLDAEQRAQQNGTDSLDGQTGTQDKGQKPNLLDRLRHRKNGYRHLKDSDEEENV

SEQ ID NO: 75 - protein, 907 aa, Artificial Sequence
  Synthetic amino acid sequence
MESRIWCLVVCVNLCIVCLGAAVSSSSTRGTSATHSHHSSHTTSAAHSRSGSVSQRVTSSQTVSHGVNETIYNTTLKYGDVVGVNTTKYPYRVCSMAQGTDLIRFERNIVCTSMKPINEDLDEGIMVVYKRNIVAHTFKVRVYQKVLTFRRSYAYIHTTYLLGSNTEYVAPPMWEIHHINSHSQCYSSYSRVIAGTVFVAYHRDSYENKTMQLMPDDYSNTHSTRYVTVKDQWHSRGSTWLYRETCNLNCMVTITTARSKYPYHFFATSTGDVVDISPFYNGTNRNASYFGENADKFFIFPNYTIVSDFGRPNSALETHRLVAFLERADSVISWDIQDEKNVTCQLTFWEASERTIRSEAEDSYHFSSACMTATFLSKKQEVNMSDSALDCVRDEAINKLQQIFNTSYNQTYEKYGNVSVFETTGGLVVFWQGIKQKSLVELERLANRSSLNLTHNRTKRSTDGNNATHLSNMESVHNLVYAQLQFTYDTLRGYINRALACIAEAWCVDQRRTLEVFKELSKINPSAILSAIYNKPIAARFMGDVLGLASCVTINQTSVKVLRDMNVKESPGRCYSRPVVIFNFANSSYVQYGQLGEDNEILLGNHRTEECQLPSLKIFIAGNSAYEYVDYLFKRMIDLSSISTVDSMIALDIDPLENTDFRVLELYSQKELRSSNVFDLEEIMREFNSYKQRVKYVEDKVVDPLPPYLKGLDDLMSGLGAAGKAVGVAIGAVGGAVASVVEGVATFLKNPFGAFTIILVAIAVVIIIYLIYTRQRRLCMQPLQNLFPYLVSADGTTVTSGNTKDTSLQAPPSYEESVYNSGRKGPGPPSSDASTAAPPYTNEQAYQMLLALVRLDAEQRAQQNGTDSLDGQTGTQDKGQKPNLLDRLRHRKNGYRHLKDSDEEENV

SEQ ID NO: 76 - protein, 907 aa, Artificial Sequence
  Synthetic amino acid sequence
MESRIWCLVVCVNLCIVCLGAAVSSSSTRGTSATHSHHSSHTTSAAHSRSGSVSQRVTSSQTVSHGVNETIYNTTLKYGDVVGVNTTKYPYRVCSMAQGTDLIRFERNIVCTSMKPINEDLDEGIMVVYKRNIVAHTFKVRVYQKVLTFRRSYAYIHTTYLLGSNTEYVAPPMWEIHHINSHSQCYSSYSRVIAGTVFVAYHRDSYENKTMQLMPDDYSNTHSTRYVTVKDQWHSRGSTWLYRETCNLNCMVTITTARSKYPYHFFATSTGDVVDISPFYNGTNRNASYFGENADKFFIFPNYTIVSDFGRPNSALETHRLVAFLERADSVISWDIQDEKNVTCQLTFWEASERTIRSEAEDSYHFSSAKMTATFLSKKQEVNMSDSALDCVRDEAINKLQQIFNTSYNQTYEKYGNVSVFETTGGLVVFWQGIKQKSLVELERLANRSSLNLTHNRTKRSTDGNNATHLSNMESVHNLVYAQLQFTYDTLRGYINRALAQIAEAWCVDQRRTLEVFKELSCINPSAILSAIYNKPIAARFMGDVLGLASCVTINQTSVKVLRDMNVKESPGRCYSRPVVIFNFANSSYVQYGQLGEDNEILLGNHRTEECQLPSLKIFIAGNSAYEYVDYLFKRMIDLSSISTVDSMIALDIDPLENTDFRVLELYSQKELRSSNVFDLEECMREFNSYKQRVKYVEDKVVDPLPPYLKGLDDLMSGLGAAGKAVGVAIGAVGGAVASVVEGVATFLKNPFGAFTIILVAIAVVIIIYLIYTRQRRLCMQPLQNLFPYLVSADGTTVTSGNTKDTSLQAPPSYEESVYNSGRKGPGPPSSDASTAAPPYTNEQAYQMLLALVRLDAEQRAQQNGTDSLDGQTGTQDKGQKPNLLDRLRHRKNGYRHLKDSDEEENV

SEQ ID NO: 77 - protein, 907 aa, Artificial Sequence
  Synthetic amino acid sequence
MESRIWCLVVCVNLCIVCLGAAVSSSSTRGTSATHSHHSSHTTSAAHSRSGSVSQRVTSSQTVSHGVNETIYNTTLKYGDVVGVNTTKYPYRVCSMAQGTDLIRFERNIVCTSMKPINEDLDEGIMVVYKRNIVAHTFKVRVYQKVLTFRRSYAYIHTTYLLGSNTEYVAPPMWEIHHINSHSQCYSSYSRVIAGTVFVAYHRDSYENKTMQLMPDDYSNTHSTRYVTVKDQWHSRGSTWLYRETCNLNCMVTITTARSKYPYHFFATSTGDVVDISPFYNGTNRNASYFGENADKFFIFPNYTIVSDFGRPNSALETHRLVAFLERADSVISWDIQDEKNVTCQLTFWEASERTIRSEAEDSYHFSSAKMTATFLSKKQEVNMSDSALDCVRDEAINKLQQIFNTSYNQTYEKYGNVSVFETTGGLVVFWQGIKQKSLVELERLANRSSLNLTHNRTKRSTDGNNATHLSNMESVHNLVYAQLQFTYDTLRGYINRALAQIAEAWCVDQRRTLEVFKELSKCNPSAILSAIYNKPIAARFMGDVLGLASCVTINQTSVKVLRDMNVKESPGRCYSRPVVIFNFANSSYVQYGQLGEDNEILLGNHRTEECQLPSLKIFIAGNSAYEYVDYLFKRMIDLSSISTVDSMIALDIDPLENTDFRVLELYSQKELRSSNVFDLEECMREFNSYKQRVKYVEDKVVDPLPPYLKGLDDLMSGLGAAGKAVGVAIGAVGGAVASVVEGVATFLKNPFGAFTIILVAIAVVIIIYLIYTRQRRLCMQPLQNLFPYLVSADGTTVTSGNTKDTSLQAPPSYEESVYNSGRKGPGPPSSDASTAAPPYTNEQAYQMLLALVRLDAEQRAQQNGTDSLDGQTGTQDKGQKPNLLDRLRHRKNGYRHLKDSDEEENV

SEQ ID NO: 78 - protein, 907 aa, Artificial Sequence
  Synthetic amino acid sequence
MESRIWCLVVCVNLCIVCLGAAVSSSSTRGTSATHSHHSSHTTSAAHSRSGSVSQRVTSSQTVSHGVNETIYNTTLKYGDVVGVNTTKYPYRVCSMAQGTDLIRFERNIVCTSMKPINEDLDEGIMVVYKRNIVAHTFKVRVYQKVLTFRRSYAYIHTTYLLGSNTEYVAPPMWEIHHINSHSQCYSSYSRVIAGTVFVAYHRDSYENKTMQLMPDDYSNTHSTRYVTVKDQWHSRGSTWLYRETCNLNCMVTITTARSKYPYHFFATSTGDVVDISPFYNGTNRNASYFGENADKFFIFPNYTIVSDFGRPNSALETHRLVAFLERADSVISWDIQDEKNVTCQLTFWEASERTIRSEAEDSYHFSSAKMTATFLSKKQEVNMSDSALDCVRDEAINKLQQIFNTSYNQTYEKYGNVSVFETTGGLVVFWQGIKQKSLVELERLANRSSLNLTHNRTKRSTDGNNATHLSNMESVHNLVYAQLQFTYDTLRGYINRALAQIAEAWCVDQRRTLEVFKELSKCNPSAILSAIYNKPIAARFMGDVLGLASCVTINQTSVKVLRDMNVKESPGRCYSRPVVIFNFANSSYVQYGQLGEDNEILLGNHRTEECQLPSLKIFIAGNSAYEYVDYLFKRMIDLSSISTVDSMIALDIDPLENTDFRVLELYSQKELRSSNVFDLEEICREFNSYKQRVKYVEDKVVDPLPPYLKGLDDLMSGLGAAGKAVGVAIGAVGGAVASVVEGVATFLKNPFGAFTIILVAIAVVIIIYLIYTRQRRLCMQPLQNLFPYLVSADGTTVTSGNTKDTSLQAPPSYEESVYNSGRKGPGPPSSDASTAAPPYTNEQAYQMLLALVRLDAEQRAQQNGTDSLDGQTGTQDKGQKPNLLDRLRHRKNGYRHLKDSDEEENV

SEQ ID NO: 79 - protein, 907 aa, Artificial Sequence
  Synthetic amino acid sequence
MESRIWCLVVCVNLCIVCLGAAVSSSSTRGTSATHSHHSSHTTSAAHSRSGSVSQRVTSSQTVSHGVNETIYNTTLKYGDVVGVNTTKYPYRVCSMAQGTDLIRFERNIVCTSMKPINEDLDEGIMVVYKRNIVAHTFKVRVYQKVLTFRRSYAYIHTTYLLGSNTEYVAPPMWEIHHINSHSQCYSSYSRVIAGTVFVAYHRDSYENKTMQLMPDDYSNTHSTRYVTVKDQWHSRGSTWLYRETCNLNCMVTITTARSKYPYHFFATSTGDVVDISPFYNGTNRNASYFGENADKFFIFPNYTIVSDFGRPNSALETHRLVAFLERADSVISWDIQDEKNVTCQLTFWEASERTIRSEAEDSYHFSSAKMTATFLSKKQEVNMSDSALDCVRDEAINKLQQIFNTSYNQTYEKYGNVSVFETTGGLVVFWQGIKQKSLVELERLANRSSLNLTHNRTKRSTDGNNATHLSNMESVHNLVYAQLQFTYDTLRGYINRALAQIAEAWCVDQRRTLEVFKELSKICPSAILSAIYNKPIAARFMGDVLGLASCVTINQTSVKVLRDMNVKESPGRCYSRPVVIFNFANSSYVQYGQLGEDNEILLGNHRTEECQLPSLKIFIAGNSAYEYVDYLFKRMIDLSSISTVDSMIALDIDPLENTDFRVLELYSQKELRSSNVFDLEEICREFNSYKQRVKYVEDKVVDPLPPYLKGLDDLMSGLGAAGKAVGVAIGAVGGAVASVVEGVATFLKNPFGAFTIILVAIAVVIIIYLIYTRQRRLCMQPLQNLFPYLVSADGTTVTSGNTKDTSLQAPPSYEESVYNSGRKGPGPPSSDASTAAPPYTNEQAYQMLLALVRLDAEQRAQQNGTDSLDGQTGTQDKGQKPNLLDRLRHRKNGYRHLKDSDEEENV

SEQ ID NO: 80 - protein, 907 aa, Artificial Sequence
  Synthetic amino acid sequence
MESRIWCLVVCVNLCIVCLGAAVSSSSTRGTSATHSHHSSHTTSAAHSRSGSVSQRVTSSQTVSHGVNETIYNTTLKYGDVVGVNTTKYPYRVCSMAQGTDLIRFERNIVCTSMKPINEDLDEGIMVVYKRNIVAHTFKVRVYQKVLTFRRSYAYIHTTYLLGSNTEYVAPPMWEIHHINSHSQCYSSYSRVIAGTVFVAYHRDSYENKTMQLMPDDYSNTHSTRYVTVKDQWHSRGSTWLYRETCNLNCMVTITTARSKYPYHFFATSTGDVVDISPFYNGTNRNASYFGENADKFFIFPNYTIVSDFGRPNSALETHRLVAFLERADSVISWDIQDEKNVTCQLTFWEASERTIRSEAEDSYHFSSAKMTATFLSKKQEVNMSDSALDCVRDEAINKLQQIFNTSYNQTYEKYGNVSVFETTGGLVVFWQGIKQKSLVELERLANRSSLNLTHNRTKRSTDGNNATHLSNMESVHNLVYAQLQFTYDTLRGYINRALAQIAEAWCVDQRRTLEVFKELSKINCSAILSAIYNKPIAARFMGDVLGLASCVTINQTSVKVLRDMNVKESPGRCYSRPVVIFNFANSSYVQYGQLGEDNEILLGNHRTEECQLPSLKIFIAGNSAYEYVDYLFKRMIDLSSISTVDSMIALDIDPLENTDFRVLELYSQKELRSSNVFDLCEIMREFNSYKQRVKYVEDKVVDPLPPYLKGLDDLMSGLGAAGKAVGVAIGAVGGAVASVVEGVATFLKNPFGAFTIILVAIAVVIIIYLIYTRQRRLCMQPLQNLFPYLVSADGTTVTSGNTKDTSLQAPPSYEESVYNSGRKGPGPPSSDASTAAPPYTNEQAYQMLLALVRLDAEQRAQQNGTDSLDGQTGTQDKGQKPNLLDRLRHRKNGYRHLKDSDEEENV

SEQ ID NO: 81 - protein, 907 aa, Artificial Sequence
  Synthetic amino acid sequence
MESRIWCLVVCVNLCIVCLGAAVSSSSTRGTSATHSHHSSHTTSAAHSRSGSVSQRVTSSQTVSHGVNETIYNTTLKYGDVVGVNTTKYPYRVCSMAQGTDLIRFERNIVCTSMKPINEDLDEGIMVVYKRNIVAHTFKVRVYQKVLTFRRSYAYIHTTYLLGSNTEYVAPPMWEIHHINSHSQCYSSYSRVIAGTVFVAYHRDSYENKTMQLMPDDYSNTHSTRYVTVKDQWHSRGSTWLYRETCNLNCMVTITTARSKYPYHFFATSTGDVVDISPFYNGTNRNASYFGENADKFFIFPNYTIVSDFGRPNSALETHRLVAFLERADSVISWDIQDEKNVTCQLTFWEASERTIRSEAEDSYHFSSAKMTATFLSKKQEVNMSDSALDCVRDEAINKLQQIFNTSYNQTYEKYGNVSVFETTGGLVVFWQGIKQKSLVELERLANRSSLNLTHNRTKRSTDGNNATHLSNMESVHNLVYAQLQFTYDTLRGYINRALAQIAEAWCVDQRRTLEVFKELSKINPSAILSAIYNKPIAACFMGDVLGLASCVTINQTSVKVLRDMNVKESPGRCYSRPVVIFNFANSSYVQYGQLGEDNEILLGNHRTEECQLPSLKIFIAGNSAYEYVDYLFKRMIDLSSISTVDSMIALDIDPLENTDFRVLELYSQKELRSSNVFDCEEIMREFNSYKQRVKYVEDKVVDPLPPYLKGLDDLMSGLGAAGKAVGVAIGAVGGAVASVVEGVATFLKNPFGAFTIILVAIAVVIIIYLIYTRQRRLCMQPLQNLFPYLVSADGTTVTSGNTKDTSLQAPPSYEESVYNSGRKGPGPPSSDASTAAPPYTNEQAYQMLLALVRLDAEQRAQQNGTDSLDGQTGTQDKGQKPNLLDRLRHRKNGYRHLKDSDEEENV

SEQ ID NO: 82 - protein, 907 aa, Artificial Sequence
  Synthetic amino acid sequence
MESRIWCLVVCVNLCIVCLGAAVSSSSTRGTSATHSHHSSHTTSAAHSRSGSVSQRVTSSQTVSHGVNETIYNTTLKYGDVVGVNTTKYPYRVCSMAQGTDLIRFERNIVCTSMKPINEDLDEGIMVVYKRNIVAHTFKVRVYQKVLTFRRSYAYIHTTYLLGSNTEYVAPPMWEIHHINSHSQCYSSYSRVIAGTVFVAYHRDSYENKTMQLMPDDYSNTHSTRYVTVKDQWHSRGSTWLYRETCNLNCMVTITTARSKYPYHFFATSTGDVVDISPFYNGTNRNASYFGENADKFFIFPNYTIVSDFGRPNSALETHRLVAFLERADSVISWDIQDEKNVTCQLTFWEASERTIRSEAEDSYHFSSAKMTATFLSKKQEVNMSDSALDCVRDEAINKLQQIFNTSYNQTYEKYGNVSVFETTGGLVVFWQGIKQKSLVELERLANRSSLNLTHNRTKRSTDGNNATHLSNMESVHNLVYAQLQFTYDTLRGYINRALAQIAEAWCVDQRRTLEVFKELSKINPSAILSAIYNKPIAARCMGDVLGLASCVTINQTSVKVLRDMNVKESPGRCYSRPVVIFNFANSSYVQYGQLGEDNEILLGNHRTEECQLPSLKIFIAGNSAYEYVDYLFKRMIDLSSISTVDSMIALDIDPLENTDFRVLELYSQKELRSSNVFDCEEIMREFNSYKQRVKYVEDKVVDPLPPYLKGLDDLMSGLGAAGKAVGVAIGAVGGAVASVVEGVATFLKNPFGAFTIILVAIAVVIIIYLIYTRQRRLCMQPLQNLFPYLVSADGTTVTSGNTKDTSLQAPPSYEESVYNSGRKGPGPPSSDASTAAPPYTNEQAYQMLLALVRLDAEQRAQQNGTDSLDGQTGTQDKGQKPNLLDRLRHRKNGYRHLKDSDEEENV

SEQ ID NO: 83 - protein, 907 aa, Artificial Sequence
  Synthetic amino acid sequence
MESRIWCLVVCVNLCIVCLGAAVSSSSTRGTSATHSHHSSHTTSAAHSRSGSVSQRVTSSQTVSHGVNETIYNTTLKYGDVVGVNTTKYPYRVCSMAQGTDLIRFERNIVCTSMKPINEDLDEGIMVVYKRNIVAHTFKVRVYQKVLTFRRSYAYIHTTYLLGSNTEYVAPPMWEIHHINSHSQCYSSYSRVIAGTVFVAYHRDSYENKTMQLMPDDYSNTHSTRYVTVKDQWHSRGSTWLYRETCNLNCMVTITTARSKYPYHFFATSTGDVVDISPFYNGTNRNASYFGENADKFFIFPNYTIVSDFGRPNSALETHRLVAFLERADSVISWDIQDEKNVTCQLTFWEASERTIRSEAEDSYHFSSAKMTATFLSKKQEVNMSDSALDCVRDEAINKLQQIFNTSYNQTYEKYGNVSVFETTGGLVVFWQGIKQKSLVELERLANRSSLNLTHNRTKRSTDGNNATHLSNMESVHNLVYAQLQFTYDTLRGYINRALAQIAEAWCVDQRRTLEVFKELSKINPSAILSAIYNKPIAARFMGDVLGCASCVTINQTSVKVLRDMNVKESPGRCYSRPVVIFNFANSSYVQYGQLGEDNEILLGNHRTEECQLPSLKIFIAGNSAYEYVDYLFKRMIDLSSISTVDSMIALDIDCLENTDFRVLELYSQKELRSSNVFDLEEIMREFNSYKQRVKYVEDKVVDPLPPYLKGLDDLMSGLGAAGKAVGVAIGAVGGAVASVVEGVATFLKNPFGAFTIILVAIAVVIIIYLIYTRQRRLCMQPLQNLFPYLVSADGTTVTSGNTKDTSLQAPPSYEESVYNSGRKGPGPPSSDASTAAPPYTNEQAYQMLLALVRLDAEQRAQQNGTDSLDGQTGTQDKGQKPNLLDRLRHRKNGYRHLKDSDEEENV

SEQ ID NO: 84 - protein, 907 aa, Artificial Sequence
  Synthetic amino acid sequence
MESRIWCLVVCVNLCIVCLGAAVSSSSTRGTSATHSHHSSHTTSAAHSRSGSVSQRVTSSQTVSHGVNETIYNTTLKYGDVVGVNTTKYPYRVCSMAQGTDLIRFERNIVCTSMKPINEDLDEGIMVVYKRNIVAHTFKVRVYQKVLTFRRSYAYIHTTYLLGSNTEYVAPPMWEIHHINSHSQCYSSYSRVIAGTVFVAYHRDSYENKTMQLMPDDYSNTHSTRYVTVKDQWHSRGSTWLYRETCNLNCMVTITTARSKYPYHFFATSTGDVVDISPFYNGTNRNASYFGENADKFFIFPNYTIVSDFGRPNSALETHRLVAFLERADSVISWDIQDEKNVTCQLTFWEASERTIRSEAEDSYHFSSAKMTATFLSKKQEVNMSDSALDCVRDEAINKLQQIFNTSYNQTYEKYGNVSVFETTGGLVVFWQGIKQKSLVELERLANRSSLNLTHNRTKRSTDGNNATHLSNMESVHNLVYAQLQFTYDTLRGYINRALAQIAEAWCVDQRRTLEVFKELSKINPSAILSAIYNKPIAARFMGDVLGLCSCVTINQTSVKVLRDMNVKESPGRCYSRPVVIFNFANSSYVQYGQLGEDNEILLGNHRTEECQLPSLKIFIAGNSAYEYVDYLFKRMIDLSSISTVDSMIALDIDPLECTDFRVLELYSQKELRSSNVFDLEEIMREFNSYKQRVKYVEDKVVDPLPPYLKGLDDLMSGLGAAGKAVGVAIGAVGGAVASVVEGVATFLKNPFGAFTIILVAIAVVIIIYLIYTRQRRLCMQPLQNLFPYLVSADGTTVTSGNTKDTSLQAPPSYEESVYNSGRKGPGPPSSDASTAAPPYTNEQAYQMLLALVRLDAEQRAQQNGTDSLDGQTGTQDKGQKPNLLDRLRHRKNGYRHLKDSDEEENV

SEQ ID NO: 85 - protein, 907 aa, Artificial Sequence
  Synthetic amino acid sequence
MESRIWCLVVCVNLCIVCLGAAVSSSSTRGTSATHSHHSSHTTSAAHSRSGSVSQRVTSSQTVSHGVNETIYNTTLKYGDVVGVNTTKYPYRVCSMAQGTDLIRFERNIVCTSMKPINEDLDEGIMVVYKRNIVAHTFKVRVYQKVLTFRRSYAYIHTTYLLGSNTEYVAPPMWEIHHINSHSQCYSSYSRVIAGTVFVAYHRDSYENKTMQLMPDDYSNTHSTRYVTVKDQWHSRGSTWLYRETCNLNCMVTITTARSKYPYHFFATSTGDVVDISPFYNGTNRNASYFGENADKFFIFPNYTIVSDFGRPNSALETHRLVAFLERADSVISWDIQDEKNVTCQLTFWEASERTIRSEAEDSYHFSSAKMTATFLSKKQEVNMSDSALDCVRDEAINKLQQIFNTSYNQTYEKYGNVSVFETTGGLVVFWQGIKQKSLVELERLANRSSLNLTHNRTKRSTDGNNATHLSNMESVHNLVYAQLQFTYDTLRGYINRALAQIAEAWCVDQRRTLEVFKELSKINPSAILSAIYNKPIAARFMGDVLGLACCVTINQTSVKVLRDMNVKESPGRCYSRPVVIFNFANSSYVQYGQLGEDNEILLGNHRTEECQLPSLKIFIAGNSAYEYVDYLFKRMIDLSSISTVDSMIALDIDCLENTDFRVLELYSQKELRSSNVFDLEEIMREFNSYKQRVKYVEDKVVDPLPPYLKGLDDLMSGLGAAGKAVGVAIGAVGGAVASVVEGVATFLKNPFGAFTIILVAIAVVIIIYLIYTRQRRLCMQPLQNLFPYLVSADGTTVTSGNTKDTSLQAPPSYEESVYNSGRKGPGPPSSDASTAAPPYTNEQAYQMLLALVRLDAEQRAQQNGTDSLDGQTGTQDKGQKPNLLDRLRHRKNGYRHLKDSDEEENV

SEQ ID NO: 86 - protein, 907 aa, Artificial Sequence
  Synthetic amino acid sequence
MESRIWCLVVCVNLCIVCLGAAVSSSSTRGTSATHSHHSSHTTSAAHSRSGSVSQRVTSSQTVSHGVNETIYNTTLKYGDVVGVNTTKYPYRVCSMAQGTDLIRFERNIVCTSMKPINEDLDEGIMVVYKRNIVAHTFKVRVYQKVLTFRRSYAYIHTTYLLGSNTEYVAPPMWEIHHINSHSQCYSSYSRVIAGTVFVAYHRDSYENKTMQLMPDDYSNTHSTRYVTVKDQWHSRGSTWLYRETCNLNCMVTITTARSKYPYHFFATSTGDVVDISPFYNGTNRNASYFGENADKFFIFPNYTIVSDFGRPNSALETHRLVAFLERADSVISWDIQDEKNVTCQLTFWEASERTIRSEAEDSYHFSSAKMTATFLSKKQEVNMSDSALDCVRDEAINKLQQIFNTSYNQTYEKYGNVSVFETTGGLVVFWQGIKQKSLVELERLANRSSLNLTHNRTKRSTDGNNATHLSNMESVHNLVYAQLQFTYDTLRGYINRALAQIAEAWCVDQRRTLEVFKELSKINPSAILSAIYNKPIAARFMGDVLGLACCVTINQTSVKVLRDMNVKESPGRCYSRPVVIFNFANSSYVQYGQLGEDNEILLGNHRTEECQLPSLKIFIAGNSAYEYVDYLFKRMIDLSSISTVDSMIALDIDPLCNTDFRVLELYSQKELRSSNVFDLEEIMREFNSYKQRVKYVEDKVVDPLPPYLKGLDDLMSGLGAAGKAVGVAIGAVGGAVASVVEGVATFLKNPFGAFTIILVAIAVVIIIYLIYTRQRRLCMQPLQNLFPYLVSADGTTVTSGNTKDTSLQAPPSYEESVYNSGRKGPGPPSSDASTAAPPYTNEQAYQMLLALVRLDAEQRAQQNGTDSLDGQTGTQDKGQKPNLLDRLRHRKNGYRHLKDSDEEENV

SEQ ID NO: 87 - protein, 907 aa, Artificial Sequence
  Synthetic amino acid sequence
MESRIWCLVVCVNLCIVCLGAAVSSSSTRGTSATHSHHSSHTTSAAHSRSGSVSQRVTSSQTVSHGVNETIYNTTLKYGDVVGVNTTKYPYRVCSMAQGTDLIRFERNIVCTSMKPINEDLDEGIMVVYKRNIVAHTFKVRVYQKVLTFRRSYAYIHTTYLLGSNTEYVAPPMWEIHHINSHSQCYSSYSRVIAGTVFVAYHRDSYENKTMQLMPDDYSNTHSTRYVTVKDQWHSRGSTWLYRETCNLNCMVTITTARSKYPYHFFATSTGDVVDISPFYNGTNRNASYFGENADKFFIFPNYTIVSDFGRPNSALETHRLVAFLERADSVISWDIQDEKNVTCQLTFWEASERTIRSEAEDSYHFSSAKMTATFLSKKQEVNMSDSALDCVRDEAINKLQQIFNTSYNQTYEKYGNVSVFETTGGLVVFWQGIKQKSLVELERLANRSSLNLTHNRTKRSTDGNNATHLSNMESVHNLVYAQLQFTYDTLRGYINRALAQIAEAWCVDQRRTLEVFKELSKINPSAILSAIYNKPIAARFMGDVLGLASCVTINQTSVKVLRDMNVKESPGRCYSRPVVIFNFANSSYVCYGQLGEDNEILLGNHRTEECQLPSLKIFIAGNSAYEYVDYLFKRMIDLSSISTVDSMIALDIDPLENTDFRVLELYCQKELRSSNVFDLEEIMREFNSYKQRVKYVEDKVVDPLPPYLKGLDDLMSGLGAAGKAVGVAIGAVGGAVASVVEGVATFLKNPFGAFTIILVAIAVVIIIYLIYTRQRRLCMQPLQNLFPYLVSADGTTVTSGNTKDTSLQAPPSYEESVYNSGRKGPGPPSSDASTAAPPYTNEQAYQMLLALVRLDAEQRAQQNGTDSLDGQTGTQDKGQKPNLLDRLRHRKNGYRHLKDSDEEENV

SEQ ID NO: 88 - protein, 907 aa, Artificial Sequence
  Synthetic amino acid sequence
MESRIWCLVVCVNLCIVCLGAAVSSSSTRGTSATHSHHSSHTTSAAHSRSGSVSQRVTSSQTVSHGVNETIYNTTLKYGDVVGVNTTKYPYRVCSMAQGTDLIRFERNIVCTSMKPINEDLDEGIMVVYKRNIVAHTFKVRVYQKVLTFRRSYAYIHTTYLLGSNTEYVAPPMWEIHHINSHSQCYSSYSRVIAGTVFVAYHRDSYENKTMQLMPDDYSNTHSTRYVTVKDQWHSRGSTWLYRETCNLNCMVTITTARSKYPYHFFATSTGDVVDISPFYNGTNRNASYFGENADKFFIFPNYTIVSDFGRPNSALETHRLVAFLERADSVISWDIQDEKNVTCQLTFWEASERTIRSEAEDSYHFSSAKMTATFLSKKQEVNMSDSALDCVRDEAINKLQQIFNTSYNQTYEKYGNVSVFETTGGLVVFWQGIKQKSLVELERLANRSSLNLTHNRTKRSTDGNNATHLSNMESVHNLVYAQLQFTYDTLRGYINRALAQIAEAWCVDQRRTLEVFKELSKINPSAILSAIYNKPIAARFMGDVLGLASCVTINQTSVKVLRDMNVKESPGRCYSRPVVIFNFANSSYVQYGQLGEDNEILCGNHRTEECQLPSLKIFIAGNSAYEYVDYLFKRMIDLSSISTVDSMIALDIDPLENTDFRVLELCSQKELRSSNVFDLEEIMREFNSYKQRVKYVEDKVVDPLPPYLKGLDDLMSGLGAAGKAVGVAIGAVGGAVASVVEGVATFLKNPFGAFTIILVAIAVVIIIYLIYTRQRRLCMQPLQNLFPYLVSADGTTVTSGNTKDTSLQAPPSYEESVYNSGRKGPGPPSSDASTAAPPYTNEQAYQMLLALVRLDAEQRAQQNGTDSLDGQTGTQDKGQKPNLLDRLRHRKNGYRHLKDSDEEENV

SEQ ID NO: 89 - protein, 907 aa, Artificial Sequence
  Synthetic amino acid sequence
MESRIWCLVVCVNLCIVCLGAAVSSSSTRGTSATHSHHSSHTTSAAHSRSGSVSQRVTSSQTVSHGVNETIYNTTLKYGDVVGVNTTKYPYRVCSMAQGTDLIRFERNIVCTSMKPINEDLDEGIMVVYKRNIVAHTFKVRVYQKVLTFRRSYAYIHTTYLLGSNTEYVAPPMWEIHHINSHSQCYSSYSRVIAGTVFVAYHRDSYENKTMQLMPDDYSNTHSTRYVTVKDQWHSRGSTWLYRETCNLNCMVTITTARSKYPYHFFATSTGDVVDISPFYNGTNRNASYFGENADKFFIFPNYTIVSDFGRPNSALETHRLVAFLERADSVISWDIQDEKNVTCQLTFWEASERTIRSEAEDSYHFSSAKMTATFLSKKQEVNMSDSALDCVRDEAINKLQQIFNTSYNQTYEKYGNVSVFETTGGLVVFWQGIKQKSLVELERLANRSSLNLTHNRTKRSTDGNNATHLSNMESVHNLVYAQLQFTYDTLRGYINRALAQIAEAWCVDQRRTLEVFKELSKINPSAILSAIYNKPIAARFMGDVLGLASCVTINQTSVKVLRDMNVKESPGRCYSRPVVIFNFANSSYVQYGQLGEDNEILLCNHRTEECQLPSLKIFIAGNSAYEYVDYLFKRMIDLSSISTVDSMIALDIDPLENTDFRVLELYSQKECRSSNVFDLEEIMREFNSYKQRVKYVEDKVVDPLPPYLKGLDDLMSGLGAAGKAVGVAIGAVGGAVASVVEGVATFLKNPFGAFTIILVAIAVVIIIYLIYTRQRRLCMQPLQNLFPYLVSADGTTVTSGNTKDTSLQAPPSYEESVYNSGRKGPGPPSSDASTAAPPYTNEQAYQMLLALVRLDAEQRAQQNGTDSLDGQTGTQDKGQKPNLLDRLRHRKNGYRHLKDSDEEENV

SEQ ID NO: 90 - protein, 907 aa, Artificial Sequence
  Synthetic amino acid sequence
MESRIWCLVVCVNLCIVCLGAAVSSSSTRGTSATHSHHSSHTTSAAHSRSGSVSQRVTSSQTVSHGVNETIYNTTLKYGDVVGVNTTKYPYRVCSMAQGTDLIRFERNIVCTSMKPINEDLDEGIMVVYKRNIVAHTFKVRVYQKVLTFRRSYAYIHTTYLLGSNTEYVAPPMWEIHHINSHSQCYSSYSRVIAGTVFVAYHRDSYENKTMQLMPDDYSNTHSTRYVTVKDQWHSRGSTWLYRETCNLNCMVTITTARSKYPYHFFATSTGDVVDISPFYNGTNRNASYFGENADKFFIFPNYTIVSDFGRPNSALETHRLVAFLERADSVISWDIQDEKNVTCQLTFWEASERTIRSEAEDSYHFSSAKMTATFLSKKQEVNMSDSALDCVRDEAINKLQQIFNTSYNQTYEKYGNVSVFETTGGLVVFWQGIKQKSLVELERLANRSSLNLTHNRTKRSTDGNNATHLSNMESVHNLVYAQLQFTYDTLRGYINRALAQIAEAWCVDQRRTLEVFKELSKINPSAILSAIYNKPIAARFMGDVLGLASCVTINQTSVKVLRDMNVKESPGRCYSRPVVIFNFANSSYVQYGQLGEDNEILLGNHCTEECQLPSLKIFIAGNSAYEYVDYLFKRMIDLSSISTVDSMIALDIDPLENTDFRVLELYSQKELRSSNVFDLEEIMREFCSYKQRVKYVEDKVVDPLPPYLKGLDDLMSGLGAAGKAVGVAIGAVGGAVASVVEGVATFLKNPFGAFTIILVAIAVVIIIYLIYTRQRRLCMQPLQNLFPYLVSADGTTVTSGNTKDTSLQAPPSYEESVYNSGRKGPGPPSSDASTAAPPYTNEQAYQMLLALVRLDAEQRAQQNGTDSLDGQTGTQDKGQKPNLLDRLRHRKNGYRHLKDSDEEENV

SEQ ID NO: 91 - protein, 907 aa, Artificial Sequence
  Synthetic amino acid sequence
MESRIWCLVVCVNLCIVCLGAAVSSSSTRGTSATHSHHSSHTTSAAHSRSGSVSQRVTSSQTVSHGVNETIYNTTLKYGDVVGVNTTKYPYRVCSMAQGTDLIRFERNIVCTSMKPINEDLDEGIMVVYKRNIVAHTFKVRVYQKVLTFRRSYAYIHTTYLLGSNTEYVAPPMWEIHHINSHSQCYSSYSRVIAGTVFVAYHRDSYENKTMQLMPDDYSNTHSTRYVTVKDQWHSRGSTWLYRETCNLNCMVTITTARSKYPYHFFATSTGDVVDISPFYNGTNRNASYFGENADKFFIFPNYTIVSDFGRPNSALETHRLVAFLERADSVISWDIQDEKNVTCQLTFWEASERTIRSEAEDSYHFSSAKMTATFLSKKQEVNMSDSALDCVRDEAINKLQQIFNTSYNQTYEKYGNVSVFETTGGLVVFWQGIKQKSLVELERLANRSSLNLTHNRTKRSTDGNNATHLSNMESVHNLVYAQLQFTYDTLRGYINRALAQIAEAWCVDQRRTLEVFKELSKINPSAILSAIYNKPIAARFMGDVLGLASCVTINQTSVKVLRDMNVKESPGRCYSRPVVIFNFANSSYVQYGQLGEDNEILLGNHRCEECQLPSLKIFIAGNSAYEYVDYLFKRMIDLSSISTVDSMIALDIDPLENTDFRVLELYSQKELRSSNVFDLEEIMREFNSYKCRVKYVEDKVVDPLPPYLKGLDDLMSGLGAAGKAVGVAIGAVGGAVASVVEGVATFLKNPFGAFTIILVAIAVVIIIYLIYTRQRRLCMQPLQNLFPYLVSADGTTVTSGNTKDTSLQAPPSYEESVYNSGRKGPGPPSSDASTAAPPYTNEQAYQMLLALVRLDAEQRAQQNGTDSLDGQTGTQDKGQKPNLLDRLRHRKNGYRHLKDSDEEENV

SEQ ID NO: 92 - protein, 907 aa, Artificial Sequence
  Synthetic amino acid sequence
MESRIWCLVVCVNLCIVCLGAAVSSSSTRGTSATHSHHSSHTTSAAHSRSGSVSQRVTSSQTVSHGVNETIYNTTLKYGDVVGVNTTKYPYRVCSMAQGTDLIRFERNIVCTSMKPINEDLDEGIMVVYKRNIVAHTFKVRVYQKVLTFRRSYAYIHTTYLLGSNTEYVAPPMWEIHHINSHSQCYSSYSRVIAGTVFVAYHRDSYENKTMQLMPDDYSNTHSTRYVTVKDQWHSRGSTWLYRETCNLNCMVTITTARSKYPYHFFATSTGDVVDISPFYNGTNRNASYFGENADKFFIFPNYTIVSDFGRPNSALETHRLVAFLERADSVISWDIQDEKNVTCQLTFWEASERTIRSEAEDSYHFSSAKMTATFLSKKQEVNMSDSALDCVRDEAINKLQQIFNTSYNQTYEKYGNVSVFETTGGLVVFWQGIKQKSLVELERLANRSSLNLTHNRTKRSTDGNNATHLSNMESVHNLVYAQLQFTYDTLRGYINRALAQIAEAWCVDQRRTLEVFKELSKINPSAILSAIYNKPIAARFMGDVLGLASCVTINQTSVKVLRDMNVKESPGRCYSRPVVIFNFANSSYVQYGQLGEDNEILLGNHRTCECQLPSLKIFIAGNSAYEYVDYLFKRMIDLSSISTVDSMIALDIDPLENTDFRVLELYSQKELRSSNVFDLEEIMREFNSYCQRVKYVEDKVVDPLPPYLKGLDDLMSGLGAAGKAVGVAIGAVGGAVASVVEGVATFLKNPFGAFTIILVAIAVVIIIYLIYTRQRRLCMQPLQNLFPYLVSADGTTVTSGNTKDTSLQAPPSYEESVYNSGRKGPGPPSSDASTAAPPYTNEQAYQMLLALVRLDAEQRAQQNGTDSLDGQTGTQDKGQKPNLLDRLRHRKNGYRHLKDSDEEENV

SEQ ID NO: 93 - protein, 907 aa, Artificial Sequence
  Synthetic amino acid sequence
MESRIWCLVVCVNLCIVCLGAAVSSSSTRGTSATHSHHSSHTTSAAHSRSGSVSQRVTSSQTVSHGVNETIYNTTLKYGDVVGVNTTKYPYRVCSMAQGTDLIRFERNIVCTSMKPINEDLDEGIMVVYKRNIVAHTFKVRVYQKVLTFRRSYAYIHTTYLLGSNTEYVAPPMWEIHHINSHSQCYSSYSRVIAGTVFVAYHRDSYENKTMQLMPDDYSNTHSTRYVTVKDQWHSRGSTWLYRETCNLNCMVTITTARSKYPYHFFATSTGDVVDISPFYNGTNRNASYFGENADKFFIFPNYTIVSDFGRPNSALETHRLVAFLERADSVISWDIQDEKNVTCQLTFWEASERTIRSEAEDSYHFSSAKMTATFLSKKQEVNMSDSALDCVRDEAINKLQQIFNTSYNQTYEKYGNVSVFETTGGLVVFWQGIKQKSLVELERLANRSSLNLTHNRTKRSTDGNNATHLSNMESVHNLVYAQLQFTYDTLRGYINRALAQIAEAWCVDQRRTLEVFKELSKINPSAILSAIYNKPIAARFMGDVLGLASCVTINQTSVKVLRDMNVKESPGRCYSRPVVIFNFANSSYVQYGQLGEDNEILLGNHRTECCQLPSLKIFIAGNSAYEYVDYLFKRMIDLSSISTVDSMIALDIDPLENTDFRVLELYSQKELRCSNVFDLEEIMREFNSYKQRVKYVEDKVVDPLPPYLKGLDDLMSGLGAAGKAVGVAIGAVGGAVASVVEGVATFLKNPFGAFTIILVAIAVVIIIYLIYTRQRRLCMQPLQNLFPYLVSADGTTVTSGNTKDTSLQAPPSYEESVYNSGRKGPGPPSSDASTAAPPYTNEQAYQMLLALVRLDAEQRAQQNGTDSLDGQTGTQDKGQKPNLLDRLRHRKNGYRHLKDSDEEENV

SEQ ID NO: 94 - protein, 907 aa, Artificial Sequence
  Synthetic amino acid sequence
MESRIWCLVVCVNLCIVCLGAAVSSSSTRGTSATHSHHSSHTTSAAHSRSGSVSQRVTSSQTVSHGVNETIYNTTLKYGDVVGVNTTKYPYRVCSMAQGTDLIRFERNIVCTSMKPINEDLDEGIMVVYKRNIVAHTFKVRVYQKVLTFRRSYAYIHTTYLLGSNTEYVAPPMWEIHHINSHSQCYSSYSRVIAGTVFVAYHRDSYENKTMQLMPDDYSNTHSTRYVTVKDQWHSRGSTWLYRETCNLNCMVTITTARSKYPYHFFATSTGDVVDISPFYNGTNRNASYFGENADKFFIFPNYTIVSDFGRPNSALETHRLVAFLERADSVISWDIQDEKNVTCQLTFWEASERTIRSEAEDSYHFSSAKMTATFLSKKQEVNMSDSALDCVRDEAINKLQQIFNTSYNQTYEKYGNVSVFETTGGLVVFWQGIKQKSLVELERLANRSSLNLTHNRTKRSTDGNNATHLSNMESVHNLVYAQLQFTYDTLRGYINRALAQIAEAWCVDQRRTLEVFKELSKINPSAILSAIYNKPIAARFMGDVLGLASCVTINQTSVKVLRDMNVKESPGRCYSRPVVIFNFANSSYVQYGQLGEDNEILLGNHRTECCQLPSLKIFIAGNSAYEYVDYLFKRMIDLSSISTVDSMIALDIDPLENTDFRVLELYSQKELRSCNVFDLEEIMREFNSYKQRVKYVEDKVVDPLPPYLKGLDDLMSGLGAAGKAVGVAIGAVGGAVASVVEGVATFLKNPFGAFTIILVAIAVVIIIYLIYTRQRRLCMQPLQNLFPYLVSADGTTVTSGNTKDTSLQAPPSYEESVYNSGRKGPGPPSSDASTAAPPYTNEQAYQMLLALVRLDAEQRAQQNGTDSLDGQTGTQDKGQKPNLLDRLRHRKNGYRHLKDSDEEENV

SEQ ID NO: 95 - protein, 907 aa, Artificial Sequence
  Synthetic amino acid sequence
MESRIWCLVVCVNLCIVCLGAAVSSSSTRGTSATHSHHSSHTTSAAHSRSGSVSQRVTSSQTVSHGVNETIYNTTLKYGDVVGVNTTKYPYRVCSMAQGTDLIRFERNIVCTSMKPINEDLDEGIMVVYKRNIVAHTFKVRVYQKVLTFRRSYAYIHTTYLLGSNTEYVAPPMWEIHHINSHSQCYSSYSRVIAGTVFVAYHRDSYENKTMQLMPDDYSNTHSTRYVTVKDQWHSRGSTWLYRETCNLNCMVTITTARSKYPYHFFATSTGDVVDISPFYNGTNRNASYFGENADKFFIFPNYTIVSDFGRPNSALETHRLVAFLERADSVISWDIQDEKNVTCQLTFWEASERTIRSEAEDSYHFSSAKMTATFLSKKQEVNMSDSALDCVRDEAINKLQQIFNTSYNQTYEKYGNVSVFETTGGLVVFWQGIKQKSLVELERLANRSSLNLTHNRTKRSTDGNNATHLSNMESVHNLVYAQLQFTYDTLRGYINRALAQIAEAWCVDQRRTLEVFKELSKINPSAILSAIYNKPIAARFMGDVLGLASCVTINQTSVKVLRDMNVKESPGRCYSRPVVIFNFANSSYVQYGQLGEDNEILLGNHRTEECCLPSLKIFIAGNSAYEYVDYLFKRMIDLSSISTVDSMIALDIDPLENTDFRCLELYSQKELRSSNVFDLEEIMREFNSYKQRVKYVEDKVVDPLPPYLKGLDDLMSGLGAAGKAVGVAIGAVGGAVASVVEGVATFLKNPFGAFTIILVAIAVVIIIYLIYTRQRRLCMQPLQNLFPYLVSADGTTVTSGNTKDTSLQAPPSYEESVYNSGRKGPGPPSSDASTAAPPYTNEQAYQMLLALVRLDAEQRAQQNGTDSLDGQTGTQDKGQKPNLLDRLRHRKNGYRHLKDSDEEENV

SEQ ID NO: 96 - protein, 907 aa, Artificial Sequence
  Synthetic amino acid sequence
MESRIWCLVVCVNLCIVCLGAAVSSSSTRGTSATHSHHSSHTTSAAHSRSGSVSQRVTSSQTVSHGVNETIYNTTLKYGDVVGVNTTKYPYRVCSMAQGTDLIRFERNIVCTSMKPINEDLDEGIMVVYKRNIVAHTFKVRVYQKVLTFRRSYAYIHTTYLLGSNTEYVAPPMWEIHHINSHSQCYSSYSRVIAGTVFVAYHRDSYENKTMQLMPDDYSNTHSTRYVTVKDQWHSRGSTWLYRETCNLNCMVTITTARSKYPYHFFATSTGDVVDISPFYNGTNRNASYFGENADKFFIFPNYTIVSDFGRPNSALETHRLVAFLERADSVISWDIQDEKNVTCQLTFWEASERTIRSEAEDSYHFSSAKMTATFLSKKQEVNMSDSALDCVRDEAINKLQQIFNTSYNQTYEKYGNVSVFETTGGLVVFWQGIKQKSLVELERLANRSSLNLTHNRTKRSTDGNNATHLSNMESVHNLVYAQLQFTYDTLRGYINRALAQIAEAWCVDQRRTLEVFKELSKINPSAILSAIYNKPIAARFMGDVLGLASCVTINQTSVKVLRDMNVKESPGRCYSRPVVIFNFANSSYVQYGQLGEDNEILLGNHRTEECQLPSLKIFIAGNSAYEYVDYLFKRMIDLSSISTVDSMIALDIDPLENTDFRVLELYSQKELRSSNVFDLEEIMREFNSYKQRVKYVEDKVVDPLPPYLKGLDDLMSGLGAAGKAVGVAIGAVGGACASVVEGVATFLKNPFGACTIILVAIAVVIIIYLIYTRQRRLCMQPLQNLFPYLVSADGTTVTSGNTKDTSLQAPPSYEESVYNSGRKGPGPPSSDASTAAPPYTNEQAYQMLLALVRLDAEQRAQQNGTDSLDGQTGTQDKGQKPNLLDRLRHRKNGYRHLKDSDEEENV

SEQ ID NO: 97 - protein, 907 aa, Artificial Sequence
  Synthetic amino acid sequence
MESRIWCLVVCVNLCIVCLGAAVSSSSTRGTSATHSHHSSHTTSAAHSRSGSVSQRVTSSQTVSHGVNETIYNTTLKYGDVVGVNTTKYPYRVCSMAQGTDLIRFERNIVCTSMKPINEDLDEGIMVVYKRNIVAHTFKVRVYQKVLTFRRSYAYIHTTYLLGSNTEYVAPPMWEIHHINSHSQCYSSYSRVIAGTVFVAYHRDSYENKTMQLMPDDYSNTHSTRYVTVKDQWHSRGSTWLYRETCNLNCMVTITTARSKYPYHFFATSTGDVVDISPFYNGTNRNASYFGENADKFFIFPNYTIVSDFGRPNSALETHRLVAFLERADSVISWDIQDEKNVTCQLTFWEASERTIRSEAEDSYHFSSAKMTATFLSKKQEVNMSDSALDCVRDEAINKLQQIFNTSYNQTYEKYGNVSVFETTGGLVVFWQGIKQKSLVELERLANRSSLNLTHNRTKRSTDGNNATHLSNMESVHNLVYAQLQFTYDTLRGYINRALAQIAEAWCVDQRRTLEVFKELSKINPSAILSAIYNKPIAARFMGDVLGLASCVTINQTSVKVLRDMNVKESPGRCYSRPVVIFNFANSSYVQYGQLGEDNEILLGNHRTEECQLPSLKIFIAGNSAYEYVDYLFKRMIDLSSISTVDSMIALDIDPLENTDFRVLELYSQKELRSSNVFDLEEIMREFNSYKQRVKYVEDKVVDPLPPYLKGLDDLMSGLGAAGKAVGVAIGAVGGAVASVCEGVATFLKNPFGCFTIILVAIAVVIIIYLIYTRQRRLCMQPLQNLFPYLVSADGTTVTSGNTKDTSLQAPPSYEESVYNSGRKGPGPPSSDASTAAPPYTNEQAYQMLLALVRLDAEQRAQQNGTDSLDGQTGTQDKGQKPNLLDRLRHRKNGYRHLKDSDEEENV

SEQ ID NO: 98 - protein, 907 aa, Artificial Sequence
  Synthetic amino acid sequence
MESRIWCLVVCVNLCIVCLGAAVSSSSTRGTSATHSHHSSHTTSAAHSRSGSVSQRVTSSQTVSHGVNETIYNTTLKYGDVVGVNTTKYPYRVCSMAQGTDLIRFERNIVCTSMKPINEDLDEGIMVVYKRNIVAHTFKVRVYQKVLTFRRSYAYIHTTYLLGSNTEYVAPPMWEIHHINSHSQCYSSYSRVIAGTVFVAYHRDSYENKTMQLMPDDYSNTHSTRYVTVKDQWHSRGSTWLYRETCNLNCMVTITTARSKYPYHFFATSTGDVVDISPFYNGTNRNASYFGENADKFFIFPNYTIVSDFGRPNSALETHRLVAFLERADSVISWDIQDEKNVTCQLTFWEASERTIRSEAEDSYHFSSAKMTATFLSKKQEVNMSDSALDCVRDEAINKLQQIFNTSYNQTYEKYGNVSVFETTGGLVVFWQGIKQKSLVELERLANRSSLNLTHNRTKRSTDGNNATHLSNMESVHNLVYAQLQFTYDTLRGYINRALAQIAEAWCVDQRRTLEVFKELSKINPSAILSAIYNKPIAARFMGDVLGLASCVTINQTSVKVLRDMNVKESPGRCYSRPVVIFNFANSSYVQYGQLGEDNEILLGNHRTEECQLPSLKIFIAGNSAYEYVDYLFKRMIDLSSISTVDSMIALDIDPLENTDFRVLELYSQKELRSSNVFDLEEIMREFNSYKQRVKYVEDKVVDPLPPYLKGLDDLMSGLGAAGKAVGVAIGAVGGAVASVCEGVATFLKNPFGACTIILVAIAVVIIIYLIYTRQRRLCMQPLQNLFPYLVSADGTTVTSGNTKDTSLQAPPSYEESVYNSGRKGPGPPSSDASTAAPPYTNEQAYQMLLALVRLDAEQRAQQNGTDSLDGQTGTQDKGQKPNLLDRLRHRKNGYRHLKDSDEEENV

SEQ ID NO: 99 - protein, 907 aa, Artificial Sequence
  Synthetic amino acid sequence
MESRIWCLVVCVNLCIVCLGAAVSSSSTRGTSATHSHHSSHTTSAAHSRSGSVSQRVTSSQTVSHGVNETIYNTTLKYGDVVGVNTTKYPYRVCSMAQGTDLIRFERNIVCTSMKPINEDLDEGIMVVYKRNIVAHTFKVRVYQKVLTFRRSYAYIHTTYLLGSNTEYVAPPMWEIHHINSHSQCYSSYSRVIAGTVFVAYHRDSYENKTMQLMPDDYSNTHSTRYVTVKDQWHSRGSTWLYRETCNLNCMVTITTARSKYPYHFFATSTGDVVDISPFYNGTNRNASYFGENADKFFIFPNYTIVSDFGRPNSALETHRLVAFLERADSVISWDIQDEKNVTCQLTFWEASERTIRSEAEDSYHFSSAKMTATFLSKKQEVNMSDSALDCVRDEAINKLQQIFNTSYNQTYEKYGNVSVFETTGGLVVFWQGIKQKSLVELERLANRSSLNLTHNRTKRSTDGNNATHLSNMESVHNLVYAQLQFTYDTLRGYINRALAQIAEAWCVDQRRTLEVFKELSKINPSAILSAIYNKPIAARFMGDVLGLASCVTINQTSVKVLRDMNVKESPGRCYSRPVVIFNFANSSYVQYGQLGEDNEILLGNHRTEECQLPSLKIFIAGNSAYEYVDYLFKRMIDLSSISTVDSMIALDIDPLENTDFRVLELYSQKELRSSNVFSLEEIMREFNSYKQRVKYVEDKVVDPLPPYLKGLDDLMSGLGAAGKAVGVAIGAVGGAVASVVEGVATFLKNPFGAFTIILVAIAVVIIIYLIYTRQRRLCMQPLQNLFPYLVSADGTTVTSGNTKDTSLQAPPSYEESVYNSGRKGPGPPSSDASTAAPPYTNEQAYQMLLALVRLDAEQRAQQNGTDSLDGQTGTQDKGQKPNLLDRLRHRKNGYRHLKDSDEEENV

SEQ ID NO: 100 - protein, 907 aa, Artificial Sequence
  Synthetic amino acid sequence
MESRIWCLVVCVNLCIVCLGAAVSSSSTRGTSATHSHHSSHTTSAAHSRSGSVSQRVTSSQTVSHGVNETIYNTTLKYGDVVGVNTTKYPYRVCSMAQGTDLIRFERNIVCTSMKPINEDLDEGIMVVYKRNIVAHTFKVRVYQKVLTFRRSYAYIHTTYLLGSNTEYVAPPMWEIHHINSHSQCYSSYSRVIAGTVFVAYHRDSYENKTMQLMPDDYSNTHSTRYVTVKDQWHSRGSTWLYRETCNLNCMVTITTARSKYPYHFFATSTGDVVDISPFYNGTNRNASYFGENADKFFIFPNYTIVSDFGRPNSALETHRLVAFLERADSVISWDIQDEKNVTCQLTFWEASERTIRSEAEDSYHFSSAKMTATFLSKKQEVNMSDSALDCVRDEAINKLQQIFNTSYNQTYEKYGNVSVFETTGGLVVFWQGIKQKSLVELERLANRSSLNLTHNRTKRSTDGNNATHLSNMESVHNLVYAQLQFTYDTLRGYINRALAQIAEAWCVDQRRTLEVFKELSKINPSAILSAIYNKPIAARFMGDVLGLASCVTINQTSVKVLRDMNVKESPGRCYSRPVVIFNFANSSYVQYGQLGEDNEILLGNHRTEECQLPSLKIFIAGNSAYEYVDYLFKRMIDLSSISTVDSMIALDIDPLENTDFRVLELYSQKELRSSNVFNLEEIMREFNSYKQRVKYVEDKVVDPLPPYLKGLDDLMSGLGAAGKAVGVAIGAVGGAVASVVEGVATFLKNPFGAFTIILVAIAVVIIIYLIYTRQRRLCMQPLQNLFPYLVSADGTTVTSGNTKDTSLQAPPSYEESVYNSGRKGPGPPSSDASTAAPPYTNEQAYQMLLALVRLDAEQRAQQNGTDSLDGQTGTQDKGQKPNLLDRLRHRKNGYRHLKDSDEEENV

SEQ ID NO: 101 - protein, 907 aa, Artificial Sequence
  Synthetic amino acid sequence
MESRIWCLVVCVNLCIVCLGAAVSSSSTRGTSATHSHHSSHTTSAAHSRSGSVSQRVTSSQTVSHGVNETIYNTTLKYGDVVGVNTTKYPYRVCSMAQGTDLIRFERNIVCTSMKPINEDLDEGIMVVYKRNIVAHTFKVRVYQKVLTFRRSYAYIHTTYLLGSNTEYVAPPMWEIHHINSHSQCYSSYSRVIAGTVFVAYHRDSYENKTMQLMPDDYSNTHSTRYVTVKDQWHSRGSTWLYRETCNLNCMVTITTARSKYPYHFFATSTGDVVDISPFYNGTNRNASYFGENADKFFIFPNYTIVSDFGRPNSALETHRLVAFLERADSVISWDIQDEKNVTCQLTFWEASERTIRSEAEDSYHFSSAKMTATFLSKKQEVNMSDSALDCVRDEAINKLQQIFNTSYNQTYEKYGNVSVFETTGGLVVFWQGIKQKSLVELERLANRSSLNLTHNRTKRSTDGNNATHLSNMESVHNLVYAQLQFTYDTLRGYINRALAQIAEAWCVDQRRTLEVFKELSKINPSAILSAIYNKPIAARFMGDVLGLASCVTINQTSVKVLRDMNVKESPGRCYSRPVVIFNFANSSYVQYGQLGEDNEILLGNHRTEECQLPSLKIFIAGNSAYEYVDYLFKRMIDLSSISTVDSMIALDIDPLENTDFRVLELYSQKELRSSNVFDLESIMREFNSYKQRVKYVEDKVVDPLPPYLKGLDDLMSGLGAAGKAVGVAIGAVGGAVASVVEGVATFLKNPFGAFTIILVAIAVVIIIYLIYTRQRRLCMQPLQNLFPYLVSADGTTVTSGNTKDTSLQAPPSYEESVYNSGRKGPGPPSSDASTAAPPYTNEQAYQMLLALVRLDAEQRAQQNGTDSLDGQTGTQDKGQKPNLLDRLRHRKNGYRHLKDSDEEENV

SEQ ID NO: 102 - protein, 907 aa, Artificial Sequence
  Synthetic amino acid sequence
MESRIWCLVVCVNLCIVCLGAAVSSSSTRGTSATHSHHSSHTTSAAHSRSGSVSQRVTSSQTVSHGVNETIYNTTLKYGDVVGVNTTKYPYRVCSMAQGTDLIRFERNIVCTSMKPINEDLDEGIMVVYKRNIVAHTFKVRVYQKVLTFRRSYAYIHTTYLLGSNTEYVAPPMWEIHHINSHSQCYSSYSRVIAGTVFVAYHRDSYENKTMQLMPDDYSNTHSTRYVTVKDQWHSRGSTWLYRETCNLNCMVTITTARSKYPYHFFATSTGDVVDISPFYNGTNRNASYFGENADKFFIFPNYTIVSDFGRPNSALETHRLVAFLERADSVISWDIQDEKNVTCQLTFWEASERTIRSEAEDSYHFSSAKMTATFLSKKQEVNMSDSALDCVRDEAINKLQQIFNTSYNQTYEKYGNVSVFETTGGLVVFWQGIKQKSLVELERLANRSSLNLTHNRTKRSTDGNNATHLSNMESVHNLVYAQLQFTYDTLRGYINRALAQIAEAWCVDQRRTLEVFKELSKINPSAILSAIYNKPIAARFMGDVLGLASCVTINQTSVKVLRDMNVKESPGRCYSRPVVIFNFANSSYVQYGQLGEDNEILLGNHRTEECQLPSLKIFIAGNSAYEYVDYLFKRMIDLSSISTVDSMIALDIDPLENTDFRVLELYSQKELRSSNVFDLEQIMREFNSYKQRVKYVEDKVVDPLPPYLKGLDDLMSGLGAAGKAVGVAIGAVGGAVASVVEGVATFLKNPFGAFTIILVAIAVVIIIYLIYTRQRRLCMQPLQNLFPYLVSADGTTVTSGNTKDTSLQAPPSYEESVYNSGRKGPGPPSSDASTAAPPYTNEQAYQMLLALVRLDAEQRAQQNGTDSLDGQTGTQDKGQKPNLLDRLRHRKNGYRHLKDSDEEENV

SEQ ID NO: 103 - protein, 907 aa, Artificial Sequence
  Synthetic amino acid sequence
MESRIWCLVVCVNLCIVCLGAAVSSSSTRGTSATHSHHSSHTTSAAHSRSGSVSQRVTSSQTVSHGVNETIYNTTLKYGDVVGVNTTKYPYRVCSMAQGTDLIRFERNIVCTSMKPINEDLDEGIMVVYKRNIVAHTFKVRVYQKVLTFRRSYAYIHTTYLLGSNTEYVAPPMWEIHHINSHSQCYSSYSRVIAGTVFVAYHRDSYENKTMQLMPDDYSNTHSTRYVTVKDQWHSRGSTWLYRETCNLNCMVTITTARSKYPYHFFATSTGDVVDISPFYNGTNRNASYFGENADKFFIFPNYTIVSDFGRPNSALETHRLVAFLERADSVISWDIQDEKNVTCQLTFWEASERTIRSEAEDSYHFSSAKMTATFLSKKQEVNMSDSALDCVRDEAINKLQQIFNTSYNQTYEKYGNVSVFETTGGLVVFWQGIKQKSLVELERLANRSSLNLTHNRTKRSTDGNNATHLSNMESVHNLVYAQLQFTYDTLRGYINRALAQIAEAWCVDQRRTLEVFKELSKINPSAILSAIYNKPIAARFMGDVLGLASCVTINQTSVKVLRDMNVKESPGRCYSRPVVIFNFANSSYVQYGQLGEDNEILLGNHRTEECQLPSLKIFIAGNSAYEYVDYLFKRMIDLSSISTVDSMIALDIDPLENTDFRVLELYSQKELRSSNVFDLEEIMRSFNSYKQRVKYVEDKVVDPLPPYLKGLDDLMSGLGAAGKAVGVAIGAVGGAVASVVEGVATFLKNPFGAFTIILVAIAVVIIIYLIYTRQRRLCMQPLQNLFPYLVSADGTTVTSGNTKDTSLQAPPSYEESVYNSGRKGPGPPSSDASTAAPPYTNEQAYQMLLALVRLDAEQRAQQNGTDSLDGQTGTQDKGQKPNLLDRLRHRKNGYRHLKDSDEEENV

SEQ ID NO: 104 - protein, 907 aa, Artificial Sequence
  Synthetic amino acid sequence
MESRIWCLVVCVNLCIVCLGAAVSSSSTRGTSATHSHHSSHTTSAAHSRSGSVSQRVTSSQTVSHGVNETIYNTTLKYGDVVGVNTTKYPYRVCSMAQGTDLIRFERNIVCTSMKPINEDLDEGIMVVYKRNIVAHTFKVRVYQKVLTFRRSYAYIHTTYLLGSNTEYVAPPMWEIHHINSHSQCYSSYSRVIAGTVFVAYHRDSYENKTMQLMPDDYSNTHSTRYVTVKDQWHSRGSTWLYRETCNLNCMVTITTARSKYPYHFFATSTGDVVDISPFYNGTNRNASYFGENADKFFIFPNYTIVSDFGRPNSALETHRLVAFLERADSVISWDIQDEKNVTCQLTFWEASERTIRSEAEDSYHFSSAKMTATFLSKKQEVNMSDSALDCVRDEAINKLQQIFNTSYNQTYEKYGNVSVFETTGGLVVFWQGIKQKSLVELERLANRSSLNLTHNRTKRSTDGNNATHLSNMESVHNLVYAQLQFTYDTLRGYINRALAQIAEAWCVDQRRTLEVFKELSKINPSAILSAIYNKPIAARFMGDVLGLASCVTINQTSVKVLRDMNVKESPGRCYSRPVVIFNFANSSYVQYGQLGEDNEILLGNHRTEECQLPSLKIFIAGNSAYEYVDYLFKRMIDLSSISTVDSMIALDIDPLENTDFRVLELYSQKELRSSNVFDLEEIMRQFNSYKQRVKYVEDKVVDPLPPYLKGLDDLMSGLGAAGKAVGVAIGAVGGAVASVVEGVATFLKNPFGAFTIILVAIAVVIIIYLIYTRQRRLCMQPLQNLFPYLVSADGTTVTSGNTKDTSLQAPPSYEESVYNSGRKGPGPPSSDASTAAPPYTNEQAYQMLLALVRLDAEQRAQQNGTDSLDGQTGTQDKGQKPNLLDRLRHRKNGYRHLKDSDEEENV

SEQ ID NO: 105 - protein, 907 aa, Artificial Sequence
  Synthetic amino acid sequence
MESRIWCLVVCVNLCIVCLGAAVSSSSTRGTSATHSHHSSHTTSAAHSRSGSVSQRVTSSQTVSHGVNETIYNTTLKYGDVVGVNTTKYPYRVCSMAQGTDLIRFERNIVCTSMKPIPEDLDEGIMVVYKRNIVAHTFKVRVYQKVLTFRRSYAYIHTTYLLGSNTEYVAPPMWEIHHINSHSQCYSSYSRVIAGTVFVAYHRDSYENKTMQLMPDDYSNTHSTRYVTVKDQWHSRGSTWLYRETCNLNCMVTITTARSKYPYHFFATSTGDVVDISPFYNGTNRNASYFGENADKFFIFPNYTIVSDFGRPNSALETHRLVAFLERADSVISWDIQDEKNVTCQLTFWEASERTIRSEAEDSYHFSSAKMTATFLSKKQEVNMSDSALDCVRDEAINKLQQIFNTSYNQTYEKYGNVSVFETTGGLVVFWQGIKQKSLVELERLANRSSLNLTHNRTKRSTDGNNATHLSNMESVHNLVYAQLQFTYDTLRGYINRALAQIAEAWCVDQRRTLEVFKELSKINPSAILSAIYNKPIAARFMGDVLGLASCVTINQTSVKVLRDMNVKESPGRCYSRPVVIFNFANSSYVQYGQLGEDNEILLGNHRTEECQLPSLKIFIAGNSAYEYVDYLFKRMIDLSSISTVDSMIALDIDPLENTDFRVLELYSQKELRSSNVFDLEEIMREFNSYKQRVKYVEDKVVDPLPPYLKGLDDLMSGLGAAGKAVGVAIGAVGGAVASVVEGVATFLKNPFGAFTIILVAIAVVIIIYLIYTRQRRLCMQPLQNLFPYLVSADGTTVTSGNTKDTSLQAPPSYEESVYNSGRKGPGPPSSDASTAAPPYTNEQAYQMLLALVRLDAEQRAQQNGTDSLDGQTGTQDKGQKPNLLDRLRHRKNGYRHLKDSDEEENV

SEQ ID NO: 106 - protein, 907 aa, Artificial Sequence
  Synthetic amino acid sequence
MESRIWCLVVCVNLCIVCLGAAVSSSSTRGTSATHSHHSSHTTSAAHSRSGSVSQRVTSSQTVSHGVNETIYNTTLKYGDVVGVNTTKYPYRVCSMAQGTDLIRFERNIVCTSMKPINEDLDEGIMVVYKRNIVAHTFKVRVYQKVLTFRRSYAYIHTTYLLGSNTEYVAPPMWEIHHINSHSQCYSSYSRVIAGTVFVAYHRDSYENKTMQLMPDDYSNTHSTRYVTVKDQWHSRGSTWLYRETCNLNCMVTITTARSKYPYHFFATSTGDVVDISPFYNGTNRNASYFGENADKFFIFPNYTIVSDFGRPNSALETHRLVAFLERADSVISWDIQDEKNVTCQLTFWEASERTIRSEAEDSYHFSSAKMTATFLSKKQEVNMSDSALDCVRDEAINKLQQIFNTSYNQTYEKYGNVSVFETTGGLVVFWQGIKQKSLVELERLANRSSLNLTHNRTKRSTDGNNATHLSNMESVHNLVYAQLQFTYDTLRGYINRALAQIAEAWCVDQRRTLEVFKELSKINPSAILSAIYNKPIAARFMGDVLGLASCVTINQTSVKVLRDMNVKESPGRCYSRPVVIFNFANSSYVQYGQLGEDNEILLGNHRTEECQLPSLKIFIAGNSAYEYVDYLFKRMIDLSSISTVPSMIALDIDPLENTDFRVLELYSQKELRSSNVFDLEEIMREFNSYKQRVKYVEDKVVDPLPPYLKGLDDLMSGLGAAGKAVGVAIGAVGGAVASVVEGVATFLKNPFGAFTIILVAIAVVIIIYLIYTRQRRLCMQPLQNLFPYLVSADGTTVTSGNTKDTSLQAPPSYEESVYNSGRKGPGPPSSDASTAAPPYTNEQAYQMLLALVRLDAEQRAQQNGTDSLDGQTGTQDKGQKPNLLDRLRHRKNGYRHLKDSDEEENV

SEQ ID NO: 107 - protein, 630 aa, Artificial Sequence; identical to SEQ ID NO: 44
  >5CXF:A|PDBID|CHAIN|SEQUENCE

SEQ ID NO: 108 - protein, 630 aa, Artificial Sequence; identical to SEQ ID NO: 44
  >5CXF:B|PDBID|CHAIN|SEQUENCE

SEQ ID NO: 109 - protein, 630 aa, Artificial Sequence; identical to SEQ ID NO: 44
  >5CXF:C|PDBID|CHAIN|SEQUENCE

SEQ ID NO: 110 - protein, 905 aa, Human cytomegalovirus
MESRIWCLVVCVNLCIVCLGAAVSSSSTSHATSSAHNGSHTSRTTSAQTRSVSSQHVTSSEAVSHRANETIYNTTLKYGDVVGVNTTKYPYRVCSMAQGTDLIRFERNIVCTPMKPINEDLDEGIMVVYKRNIVAHTFKVRVYQKVLTFRRSYAYIHTTYLLGSNTEYVAPPMWEIHHINRHSQCYSSYSRVIAGTVFVAYHRDSYENKTMQLMLDDYSNTHSTRYVTVKDQWHSRGSTWLYRETCNLNCMVTITTARSKYPYHFFATSTGDVVDISPFYNGTNRNTSYFGENADKFFIFPNYTIVSDFGRANSAPETHRLVAFLERADSVISWDIQDEKNVTCQLTFWEASERTIRSEAEDSYHFSSAKMTATFLSKKQEVNMSDPVLDCVRDQALNKLQQIFNASYNQTYEKYGNVSVFETTGGLVVFWQGIKQKSLLELERLANSSGVNSTRRTKRSTGNTTTLSLESESVRNVLYAQLQFTYDTLRSYINRALAQIAEAWCVDQRRTLEVFKELSKINPSAILSAIYNKPIAARFMGDVLGLASCVTINQTSVKVLRDMNVKESPGRCYSRPVVIFNFVNSSYVQYGQLGEDNEILLGNHRTEECQFPSLKIFIAGNSAYEYVDYLFKRMIDLSSISTVDSMIALDIDPLENTDFRVLELYSQKELRSSNVFDLEEIMREFNSYKQRVKYVEDKVVDPLPPYLKGLDDLMSGLGAAGKAVGVAIGAVGGAVASVVEGVATFLKNPFGAFTIILVAIAVVIIIYLIYTRQRRLCMQPLQNLFPYLVSADGTTVTSGNTKDTSLQAPPSYEESVYNSGRKGPGPPSSDASTAAPPYTNEQAYQMLLALARLDAEQRAQQNGTDSLDGQTGTQDKGQKPNLLDRLRHRKNGYRHLKDSDEEENV

SEQ ID NO: 111 - protein, 905 aa, Human cytomegalovirus
MESRIWCLVVCVNLCIVCLGAVVSSSSTSHATSSAHNGSHTSRTTSAQTRSVSSQHVTSSEAVSHRANETIYNTTLKYGDVVGVNTTKYPYRVCSMAQGTDLIRFERNIVCTPMKPINEDLDEGIMVVYKRNIVAHTFKVRVYQKVLTFRRSYAYIHTTYLLGSNTEYVAPPMWEIHHINRHSQCYSSYSRVIAGTVFVAYHRDSYENKTMQLMLDDYSNTHSTRYVTVKDQWHSRGSTWLYRETCNLNCMVTITTARSKYPYHFFATSTGDVVDISPFYNGTNRNTSYFGENADKFFIFPNYTIVSDFGRANSAPETHRLVAFLERADSVISWDIQDEKNVTCQLTFWEASERTIRSEAEDSYHFSSAKMTATFLSKKQEVNMSDPVLDCVRDQALNKLQQIFNASYNQTYEKYGNVSVFETTGGLVVFWQGIKQKSLLELERLANSSGVNSTRRTKRSTGNTTTLSLESESVRNVLYAQLQFTYDTLRSYINRALAQIAEAWCVDQRRTLEVFKELSKINPSAILSAIYNKPIAARFMGDVLGLASCVTINQTSVKVLRDMNVKESPGRCYSRPVVIFNFVNSSYVQYGQLGEDNEILLGNHRTEECQFPSLKIFIAGNSAYEYVDYLFKRMIDLSSISTVDSMIALDIDPLENTDFRVLELYSQKELRSSNVFDLEEIMREFNSYKQRVKYVEDKVVDPLPPYLKGLDDLMSGLGAAGKAVGVAIGAVGGAVASVVEGVATFLKNPFGAFTIILVAIAVVIIIYLIYTRQRRLCMQPLQNLFPYLVSADGTTVTSGNTKDTSLQAPPSYEESVYNSGRKGPGPPSSDASTAAPPYTNEQAYQMLLALARLDAEQRAQQNGTDSLDGQTGTQDKGQKPNLLDRLRHRKNGYRHLKDSDEEENV

SEQ ID NO: 112 - protein, 905 aa, Human cytomegalovirus
MESRIWCLVVCVNLCIVCLGAVVSSSSTSHATSSAHNGSHTSRTTSAQTRSVSSQHVTSSEAVSHRANETIYNTTLKYGDVVGVNTTKYPYRVCSMAQGTDLIRFERNIVCTPMKPINEDLDEGIMVVYKRNIVAHTFKVRVYQKVLTFRRSYAYIHTTYLLGSNTEYVAPPMWEIHHINRHSQCYSSYSRVIAGTVFVAYHRDSYENKTMQLMLDDYSNTHSTRYVTVKDQWHSRGSTWLYRETCNLNCMVTITTARSKYPYHFFATSTGDVVDISPFYNGTNRNTSYFGENADKFFIFPNYTIVSDFGRANSAPETHRLVAFLERADSVISWDIQDEKNVTCQLTFWEASERTIRSEAEDSYHFSSAKMTATFLSKKQEVNMSDPVLDCVRDQALNKLQQIFNASYNQTYEKYGNVSVFETTGGLVVFWQGIKQKSLLELERLANSSGVNSTRRTKRSTGNTTTLSLESESVRNVLYAQLQFTYDTLRSYINRALAQIAEAWCVDQRRTLEVFKELSKINPSAILSAIYNKPIAARFMGDVLGLASCVTINQTSVKVLRDMNVKESPGRCYSRPVVIFNFVNSSYVQYGQLGEDNEILLGNHRTEECQFPSLKIFIAGNSAYEYVDYLFKRMIDLSSISTVDSMIALDIDPLENTDFRVLELYSQKELRSSNVFDLEEIMREFNSYKQRVKYVEDKVVDPLPPYLKGLDDLMSGLGAAGKAVGVAIGAVGGAVASVVEGVATFLKNPFGAFTIILVAIAVVIIIYLIYTRQRRLCMQPLQNLFPYLVSADGTTVTSGSTKDTSLQAPPSYEESVYNSGRKGPGPPSSDASTAAPPYTNEQAYQMLLALARLDAEQRAQQNGTDSLDGRTGTQDKGQKPNLLDRLRHRKNGYRHLKDSDEEENV

SEQ ID NO: 113 - protein, 905 aa, Human cytomegalovirus
MESRIWCLVVCVNLCYVCLGAVVSSSSTSHATSSAHNGSHTSRTTSAQTRSVSSQHVTSSEAVSHRANETIYNTTLKYGDVVGVNTTKYPYRVCSMAQGTDLIRFERNIVCTPMKPINEDLDEGIMVVYKRNIVAHTFKVRVYQKVLTFRRSYAYIHTTYLLGSNTEYVAPPMWEIHHINRHSQCYSSYSRVIAGTVFVAYHRDSYENKTMQLMLDDYSNTHSTRYVTVKDQWHSRGSTWLYRETCNLNCMVTITTARSKYPYHFFATSTGDVVDISPFYNGTNRNTSYFGENADKFFIFPNYTIVSDFGRANSAPETHRLVAFLERADSVISWDIQDEKNVTCQLTFWEASERTIRSEAEDSYHFSSAKMTATFLSKKQEVNMSDPVLDCVRDQALNKLQQIFNASYNQTYEKYGNVSVFETTGGLVVFWQGIKQKSLLELERLANSSGVNSTRRTKRSTGNTTTLSLESESVRNVLYAQLQFTYDTLRSYINRALAQIAEAWCVDQRRTLEVFKELSKINPSAILSAIYNKPIAARFMGDVLGLASCVTINQTSVKVLRDMNVKESPGRCYSRPVVIFNFVNSSYVQYGQLGEDNEILLGNHRTEECQFPSLKIFIAGNSAYEYVDYLFKRMIDLSSISTVDSMIALDIDPLENTDFRVLELYSQKELRSSNVFDLEEIMREFNSYKQRVKYVEDKVVDPLPPYLKGLDDLMSGLGAAGKAVGVAIGAVGGAVASVVEGVATFLKNPFGAFTIILVAIAVVIIIYLIYTRQRRLCMQPLQNLFPYLVSADGTTVTSGNTKDTSLQAPPSYEESVYNSGRKGPGPPSSDASTAAPPYTNEQAYQMLLALARLDAEQRAQQNGTDSLDGQTGTQDKGQKPNLLDRLRHRKNGYRHLKDSDEEENV

SEQ ID NO: 114 - protein, 905 aa, Human cytomegalovirus
MESRIWCLVVCVNLCIVCLGVAVSSSSTSHATSSAHNGSHTSRTTSAQTRSVSSQHVTSSEAVSHRANETIYNTTLKYGDVVGVNTTKYPYRVCSMAQGTDLIRFERNIVCTPMKPINEDLDEGIMVVYKRNIVAHTFKVRVYQKVLTFRRSYAYIHTTYLLGSNTEYVAPPMWEIHHINRHSQCYSSYSRVIAGTVFVAYHRDSYENKTMQLMLDDYSNTHSTRYVTVKDQWHSRGSTWLYRETCNLNCMVTITTARSKYPYHFFATSTGDVVDISPFYNGTNRNTSYFGENADKFFIFPNYTIVSDFGRANSAPETHRLVAFLERADSVISWDIQDEKNVTCQLTFWEASERTIRSEAEDSYHFSSAKMTATFLSKKQEVNMSDPVLDCVRDQALNKLQQIFNASYNQTYEKYGNVSVFETTGGLVVFWQGIKQKSLLELERLANSSGVNSTRRTKRSTGNTTTLSLESESVRNVLYAQLQFTYDTLRSYINRALAQIAEAWCVDQRRTLEVFKELSKINPSAILSAIYNKPIAARFMGDVLGLASCVTINQTSVKVLRDMNVKESPGRCYSRPVVIFNFVNSSYVQYGQLGEDNEILLGNHRTEECQFPSLKIFIAGNSAYEYVDYLFKRMIDLSSISTVDSMIALDIDPLENTDFRVLELYSQKELRSSNVFDLEEIMREFNSYKQRVKYVEDKVVDPLPPYLKGLDDLMSGLGAAGKAVGVAIGAVGGAVASVVEGVATFLKNPFGAFTIILVAIAVVIIIYLIYTRQRRLCMQPLQNLFPYLVSADGTTVTSGNTKDTSLQAPPSYEESVYNSGRKGPGPPSSDASTAAPPYTNEQAYQMLLALARLDAEQRAQQNGTDSLDGQTGTQDKGQKPNLLDRLRHRKNGYRHLKDSDEEENV

SEQ ID NO: 115 - protein, 905 aa, Human cytomegalovirus
MESRIWCLVVCVNLCIVCLGAAVSSSSTSHATSSTHNGSHTSRTTSAQTRSVSSQHVTSSEAVSHRANETIYNTTLKYGDVVGVNTTKYPYRVCSMAQGTDLIRFERNIVCTPMKPINEDLDEGIMVVYKRNIVAHTFKVRVYQKVLTFRRSYAYIHTTYLLGSNTEYVAPPMWEIHHINRNSQCYSSYSRVIAGTVFVAYHRDSYENKTMQLMLDDYSNTHSTRYVTVKDQWHSRGSTWLYRETCNLNCMVTITTARSKYPYHFFATSTGDVVDISPFYNGTNRNTSYFGENADKFFIFPNYTIVSDFGRANSAPETHRLVAFLERADSVISWDIQDEKNVTCQLTFWEASERTIRSEAEDSYHFSSAKMTATFLSKKQEVNMSDPVLDCVRDQALNKLQQIFNASYNQTYEKYGNVSVFETTGGLVVFWQGIKQKSLLELERLANSSGVNSTRRTKRSTGNTTTLSLESESVRNVLYAQLQFTYDTLRSYINRALAQIAEAWCVDQRRTLEVFRELSKINPSAILSAIYNKPIAARFMGDVLGLASCVTINQTSVKVLRDMNVKESPGRCYSRPVVIFNFVNSSYVQYGQLGEDNEILLGNHRTEECQFPSLKIFIAGNSAYEYVDYLFKRMIDLSSISTVDSMIALDIDPLENTDFRVLELYSQKELRSSNVFDLEEIMREFNSYKQRVKYVEDKVVDPLPPYLKGLDDLMSGLGAAGKAVGVAIGAVGGAVASVVEGVATFLKNPFGAFTIILVAIAVVIIIYLIYTRQRRLCMQPLQNLFPYLVSADGTTVTSGSTKDTSLQAPPSYEESVYNSGRKGPGPPSSDASTAAPPYTNEQAYQMLLALARLDAEQRAQQNGTDSLDGQTGTQDKGQKPNLLDRLRHRKNGYRHLKDSDEEENV

SEQ ID NO: 116 - protein, 905 aa, Human cytomegalovirus
MESRIWCLVVCVNLCIVCLGAAVSSSSTSHATSSTHNGSHASRTTSAQTRSVSSQHVTSSKAVSHRANETIYNTTLKYGDVVGVNTTKYPYRVCSMAQGTDLIRFERNIVCTPMKPINEDLDEGIMVVYKRNIVAHTFKVRVYQKVLTFRRSYAYIHTTYLLGSNTEYVAPPMWEIHHINSHSQCYSSYSRVIAGTVFVAYHRDSYENKTMQLMLDDYSNTHSIRYVTVKDQWHSRGSTWLYRETCNLNCMVTITTARSKYPYHFFATSTGDVVDISPFYNGTNRNTSYFGENADKFFIFPNYTIVSDFGRANSAPETHRLVAFLERADSVISWDIQDEKNVTCQLTFWEASERTIRSEAEDSYHFSSAKMTATFLSKKQEVNMSDPVLDCVRNQALDKLQQIFNASYNQTYEKYGNVSVFETTGGLVVFWQGIKQKSLLELERLANSSGVNSTRRTKRSTGNTTTLSPESESVRNVLYAQLQFTYDTLRSYINRALAQIAEAWCVDQRRTLEVFKELSKINPSAILSAIYNKPIAARFMGDVLGLASCVTINQTSVKVLRDMNVKESPGRCYSRPVVIFNFVNSSYVQYGQLGEDNEILLGNHRTEECQFPSLKIFIAGNSAYEYVDYLFKRMIDLSSISTVDSMIALDIDPLENTDFRVLELYSQKELRSSNVFDLEEIMREFNSYKQRVKYVEDKVVDPLPPYLKGLDDLMSGLGAAGKAVGVAIGAVGGAVASVVEGVATFLKNPFGAFTIILVAIAVVIIIYLIYTRQRRLCMQPLQNLFPYLVSADGTTVTSGNTKDTSLQAPPSYEESVYNSGRKGPGPPSSDASTAAPPYTNEQAYQMLLALARLDAEQRAQQNGTDSLDGQTGTQDKGQKPNLLDRLRHRKNGYRHLKDSDEEENV

SEQ ID NO: 117 - protein, 904 aa, Human cytomegalovirus
MESRIWCLVVCVNLCIVCLGAAVSSSSTRGTSATHNGSHTSHTTSAQTRSVSSQHVTSSEAVSHRANETIYNTTLKYGDVVGVNTTKYPYRVCSMAQGTDLIRFERNIVCTPMKPINEDLDEGIMVVYKRNIVAHTFKVRVYQKVLTFRRSYAYIHTTYLLGSNTEYVAPPMWEIHHINSHSQCYSSYSRVIAGTVFVAYHRDSYENKTMQLMLDDYSNTHSTRYVTVKDQWHSRGSTWLYRETCNLNCMVTITTARSKYPYHFFATSTGDVVDISPFYNGTNRNTSYFGENADKFFIFPNYTIVSDFGRANSAPETHRLVAFLERADSVISWDIQDEKNVTCQLTFWEASERTIRSEAEDSYHFSSAKMTATFLSKKQEVNMSDPVLDCVRNQALNKLQQIFNASYNQTYEKYGNVSVFETTGGLVVFWQGIKQKSLLELERLANSSGVNSTRRTKRSTGNTTTLSLESESVRNVLYAQLQFTYDTLRSYINRALAQIAEAWCVDQRRTLEVFKELSKINPSAILSAIYNKPIAARFMGDVLGLASCVTINQTSVKVLRDMNVKESPGRCYSRPVVIFNFVNSSYVQYGQLGEDNEILLGNHRTEECQFPSLKIFIAGNSAYEYVDYLFKRMIDLSSISTVDSMIALDIDPLENTDFRVLELYSQKELRSSNVFDLEEIMREFNSYKQRVKYVEDKVVDPLPPYLKGLDDLMSGLGAAGKAVGVAIGAVGGAVASVVEGVATFLKNPFGAFTIILVAIAVVIIIYLIYTRQRRLCMQPLQNLFPYLVSADGTTVTSSSTKDTSLQAPPSYEESVYNSGRKGPGPPSSDASTAAPPYTNEQAYQMLLALARLDAEQRAQQNGTDSLDGQTGTQDKGQKPNLLDRLRHRKNGYRHLKDSDEEENV

SEQ ID NO: 118 - protein, 906 aa, Human cytomegalovirus
MESRIWCLVVCVNLCIVCLGAAVSSSSTSHATSSTHNGSHTSRTTSAQTRSVYSQHVTSSEAVSHRANETIYNTTLKYGDVVGVNTTKYPYRVCSMAQGTDLIRFERNIICTSMKPINEDLDEGIMVVYKRNIVAHTFKVRVYQKVLTFRRSYAYIYTTYLLGSNTEYVAPPMWEIHHINKFAQCYSSYSRVIGGTVFVAYHRDSYENKTMQLIPDDYSNTHSTRYVTVKDQWHSRGSTWLYRETCNLNCMLTITTARSKYPYHFFATSTGDVVYISPFYNGTNRNASYFGENADKFFIFPNYTIVSDFGRPNAAPETHRLVAFLERADSVISWDIQDEKNVTCQLTFWEASERTIRSEAEDSYHFSSAKMTATFLSKKQEVNMSDSALDCVRDEAINKLQQIFNTSYNQTYEKYGNVSVFETSGGLVVFWQGIKQKSLVELERLANRSSLNITHRTRRSTSDNNTTHLSSMESVHNLVYAQLQFTYDTLRGYINRALAQIAEAWCVDQRRTLEVFKELSKINPSAILSAIYNKPIAARFMGDVLGLASCVTINQTSVKVLRDMNVKESPGRCYSRPVVIFNFANSSYVQYGQLGEDNEILLGNHRTEECQLPSLKIFIAGNSAYEYVDYLFKRMIDLSSISTVDSMIALDIDPLENTDFRVLELYSQKELRSSNVFDLEEIMREFNSYKQRVKYVEDKVVDPLPPYLKGLDDLMSGLGAAGKAVGVAIGAVGGAVASVVEGVATFLKNPFGAFTIILVAIAVVIITYLIYTRQRRLCTQPLQNLFPYLVSADGTTVTSGSTKDTSLQAPPSYEESVYNSGRKGPGPPSSDASTAAPPYTNEQAYQMLLALARLDAEQRAQQNGTDSLDGQTGTQDKGQKPNLLDRLRHRKNGYRHLKDSDEEENV

SEQ ID NO: 119 - protein, 906 aa, Human cytomegalovirus
MESRIWCLVVCVNLCIVCLGAAVSSSSTSHATSSTHNGSHTSRTTSAQTRSVYSQHVTSSEAVSHRANETIYNTTLKYGDVVGVNTTKYPYRVCSMAQGTDLIRFERNIICTSMKPINEDLDEGIMVVYKRNIVAHTFKVRVYQKVLTFRRSYAYIYTTYLLGSNTEYVAPPMWEIHHINKFAQCYSSYSRVIGGTVFVAYHRDSYENKTMQLIPDDYSNTHSTRYVTVKDQWHSRGSTWLYRETCNLNCMLTITTARSKYPYHFFATSTGDVVDISPFYNGTNRNASYFGENADKFFIFPNYTIVSDFGRPNAAPETHRLVAFLERADSVISWDIQDEKNVTCQLTFWEASERTIRSEAEDSYHFSSAKMTATFLSKKQEVNMSDSALDCVRDEAINKLQQIFNTSYNQTYEKYGNVSVFETSGGLVVFWQGIKQKSLVELERLANRSSLNITHRTRRSTSDNNTTHLSSMESVHNLVYAQLQFTYDTLRGYINRALAQIAEAWCVDQRRTLEVFKELSKINPSAILSAIYNKPIAARFMGDVLGLASCVTINQTSVKVLRDMNVKESPGRCYSRPVVIFNFANSSYVQYGQLGEDNEILLGNHRTEECQLPSLKIFIAGNSAYEYVDYLFKRMIDLSSISTVDSMIALDIDPLENTDFRVLELYSQKELRSSNVFDLEEIMREFNSYKQRVKYVEDKVVDPLPPYLKGLDDLMSGLGAAGKAVGVAIGAVGGAVASVVEGVATFLKNPFGAFTIILVAIAVVIITYLIYTRQRRLCTQPLQNLFPYLVSADGTTVTSGSTKDTSLQAPPSYEESVYNSGRKGPGPPSSDASTAAPPYTNEQAYQMLLALARLDAEQRAQQNGTDSLDGQTGTQDKGQKPNLLDRLRHRKNGYRHLKDSDEEENV

SEQ ID NO: 120 - protein, 906 aa, Human cytomegalovirus
MESRIWCLVVCVNLCIVCLGAAVSSSSTSHATSSTHNGSHTSRTTSAQTRSVYSQHVTSSEAVSHRANETIYNTTLKYGDVVGVNTTKYPYRVCSMAQGTDLIRFERNIICTSMKPINEDLDEGIMVVYKRNIVAHTFKVRVYQKVLTFRRSYAYIYTTYLLGSNTEYVAPPMWEIHHINKFAQCYSSYSRVIGGTVFVAYHRDSYENKTMQLIPDDYSNTHSTRYVTVKDQWHSRGSTWLYRETCNLNCMLTITTARSKYPYHFFATSTGDVVDISPFYNGTNRNASYFGENADKFFIFPNYTIVSDFGRPNAAPETHRLVAFLERADSVISWDIQDEKNVTCQLTFWEASERTIRSEAEDSYHFSSAKMTATFLSKKQEVNMSDSALDCVRDEAINKLQQIFNTSYNQTYEKYGNVSVFETSGGLVVFWQGIKQKSLVELERLANRSSLNITHRTRRSTSDNNTTHLSSMESVHNLVYAQLQFTYDTLRGYINRALAQIAEAWCVDQRRTLEVFKELSKINPSAILSAIYNKPIAARFMGDVLGLASCVTINQTSVKVLRDMNVKESPGRCYSRPVVIFNFANSSYVQYGQLGEDNEILLGNHRTEECQLPSLKIFIAGNSAYEYVDYLFKRMIDLSSISTVDSMIALDIDPLENTDFRVLELYSQKELRSSNVFDLEEIMREFNSYKQRVKYVEDKVVDPLPPYLKGLDDLMSGLGAAGKAVGVAIGAVGGAVASVVEGVATFLKNPFGAFTIILVAIAVVIITYLIYTRQRRLCTQPLQNLFPYLVSADGTTVTSGSTKDTSLQAPPSYEESVYNSGRKGPGPPSSDASTAAPPYTNEQAYQMLLALARLDAEQRAQQNGTDSLDGQAGTQDKGQKPNLLDRLRHRKNGYRHLKDSDEEENV

SEQ ID NO: 121 - protein, 906 aa, Human cytomegalovirus
MESRIWCLVVCVNLCIVCLGAAVSSSSTSHATSSTHNGSHTSRTTSAQTRSVSSQHVTSSEAVSHRANETIYNTTLKYGDVVGVNTTKYPYRVCSMAQGTDLIRFERNIVCTPMKPINEDLDEGIMVVYKRNIVAHTFKVRVYQKVLTFRRSYAYIHTTYLLGSNTEYVAPPMWEIHHINKFAQCYSSYSRVIGGTVFVAYHRDSYENKTMQLMSDDYSNTHSTRYVTVKDQWHSRGSTWLYRETCNLNCMVTITTARSKYPYHFFATSTGDVVDISPFYNGTNRNASYFGENADKFFIFPNYTIVSDFGRPNAAPETHRLVAFLERADSVISWDIQDEKNVTCQLTFWEASERTIRSEAEDSYHFSSAKMTATFLSKKQEVNMSDSALDCVRDEAINKLQQIFNTSYNQTYEKYGNVSVFETSGGLVVFWQGIKQKSLVELERLANRSSLNITHRTRRSTSDNNTTHLSSMESVHNLVYAQLQFTYDTLRGYINRALAQIAEAWCVDQRRTLEVFKELSKINPSAILSAIYNKPIAARFMGDVLGLASCVTINQTSVKVLRDMNVKESPGRCYSRPVVIFNFANSSYVQYGQLGEDNEILLGNHRTEECQLPSLKIFIAGNSAYEYVDYLFKRMIDLSSISTVDSMIALDIDPLENTDFRVLELYSQKELRSSNVFDLEEIMREFNSYKQRVKYVEDKVVDPLPPYLKGLDDLMSGLGAAGKAVGVAIGAVGGAVASVVEGVATFLKNPFGAFTIILVAIAVVIITYLIYTRQRRLCTQPLQNLFPYLVSADGTTVTSGSTKDTSLQAPPSYEESVYNSGRKGPGPPSSDASTAAPPYTNEQAYQMLLALARLDAEQRAQQNGTDSLDGQTGTQDKGQKPNLLDRLRHRKNGYRHLKDSDEEENV

SEQ ID NO: 122 - protein, 906 aa, Human cytomegalovirus
MESRIWCLVVCVNLCIVCLGAAVSSSSTSHATSSTHNGSHTSRTTSAQTRSVSSQHVTSSEAVSHRANETIYNTTLKYGDVVGVNTTKYPYRVCSMAQGTDLIRFERNIVCTPMKPINEDLDEGIMVVYKRNIVAHTFKVRVYQKVLTFRRSYAYIHTTYLLGSNTEYVAPPMWEIHHINKFAQCYSSYSRVIGGTVFVAYHRDSYENKTMQLMPDDYSNTHSTRYVTVKDQWHSRGSTWLYRETCNLNCMVTITTARSKYPYHFFATSTGDVVDISPFYNGTNRNASYFGENADKFFIFPNYTIVSDFGRPNAAPETHRLVAFLERADSVISWDIQDEKNVTCQLTFWEASERTIRSEAEDSYHFSSAKMTATFLSKKQEVNMSDSALDCVRDEAINKLQQIFNTSYNQTYEKYGNVSVFETSGGLVVFWQGIKQKSLVELERLANRSSLNITHRTRRSTSDNNTTHLSSMESVHNLVYAQLQFTYDTLRGYINRALAQIAEAWCVDQRRTLEVFKELSKINPSAILSAIYNKPIAARFMGDVLGLASCVTINQTSVKVLRDMNVKESPGRCYSRPVVIFNFANSSYVQYGQLGEDNEILLGNHRTEECQLPSLKIFIAGNSAYEYVDYLFKRMIDLSSISTVDSMIALDIDPLENTDFRVLELYSQKELRSSNVFDLEEIMREFNSYKQRVKYVEDKVVDPLPPYLKGLDDLMSGLGAAGKAVGVAIGAVGGAVASVVEGVATFLKNPFGAFTIILVAIAVVIITYLIYTRQRRLCTQPLQNLFPYLVSADGTTVTSGSTKDTSLQAPPSYEESVYNSGRKGPGPPSSDASTAAPPYTNEQAYQMLLALARLDAEQRAQQNGTDSLDGQTGTQDKGQKPNLLDRLRHRKNGYRHLKDSDEEENV

SEQ ID NO: 123 - protein, 907 aa, Human cytomegalovirus
MESRIWCLVVCVNLCIVCLGAAVSSSSTHGTSATHSHHSSHTTSAAHSRSGSVSSQRVTSSEAVSHRANETIYNTTLKYGDVVGVNTTKYPYRVCSMAQGTDLIRFERNIVCTPMKPINEDLDEGIMVVYKRNIVAHTFKVRVYQKVLTFRRSYAYIYTTYLLGSNTEYVAPPMWEIHHINKFAQCYSSYSRVIGGTVFVAYHRDSYENKTMQLIPDDYSNTHSTRYVTVKDQWHSRGSTWLYRETCNLNCMLTITTARSKYPYHFFATSTGDVVDISPFYNGTNRNASYFGENADKFFIFPNYTIVSDFGRPNAAPETHRLVAFLERADSVISWDIQDEKNVTCQLTFWEASERTIRSEAEDSYHFSSAKMTATFLSKKQEVNMSDSALDCVRDEAINKLQQIFNTSYNQTYEKYGNVSVFETSGGLVVFWQGIKQKSLVELERLANRSSLNITHRTRRSTSDNNTTHLSSMESVHNLVYAQLQFTYDTLRGYINRALAQIAEAWCVDQRRTLEVFKELSKINPSAILSAIYNKPIAARFMGDVLGLASCVTINQTSVKVLRDMNVKESPGRCYSRPVVIFNFANSSYVQYGQLGEDNEILLGNHRTEECQLPSLKIFIAGNSAYEYVDYLFKRMIDLSSISTVDSMIALDIDPLENTDFRVLELYSQKELRSSNVFDLEEIMREFNSYKQRVKYVEDKVVDPLPPYLKGLDDLMSGLGAAGKAVGVAIGAVGGAVASVVEGVATFLKNPFGAFTIILVAIAVVIITYLIYTRQRRLCTQPLQNLFPYLVSADGTTVTSGSTKDTSLQAPPSYEESVYNSGRKGPGPPSSDASTAAPPYTNEQAYQMLLALARLDAEQRAQQNGTDSLDGQTGTQDKGQKPNLLDRLRHRKNGYRHLKDSDEEENV

SEQ ID NO: 124 - protein, 907 aa, Human cytomegalovirus
MESRIWCLVVCVNLCIVCLGAAVSSSSTHGTSATHSHHSSHTTSAAHSRSGSVSSQRVTSSEAVSHRANETIYNTTLKYGDVVGVNTTKYPYRVCSMAQGTDLIRFERNIVCTPMKPINEDLDEGIMVVYKRNIVAHTFKVRVYQKVLTFRRSYAYIYTTYLLGSNTEYVAPPMWEIHHINKFAQCYSSYSRVIGGTVFVAYHRDSYENKTMQLIPDDYSNTHSTRYVTVKDQWHSRGSTWLYRETCNLNCMLTITTARSKYPYHFFATSTGDVVDISPFYNGTNRNASYFGENADKFFIFPNYTIVSDFGRPNAAPETHRLVAFLERADSVISWDIQDEKNVTCQLTFWEASERTIRSEAEDSYHFSSAKMTATFLSKKQEVNMSDSALDCVRDEAINKLQQIFNTSYNQTYEKYGNVSVFETSGGLVVFWQGIKQKSLVELERLANRSSLNITHRTRRSTSDNNTTHLSSMESVHNLVYAQLQFTYDTLRGYINRALAQIAEAWCVDQRRTLEVFKKLSKINPSAILSAIYNKPIAARFMGDVLGLASCVTINQTSVKVLRDMNVKESPGRCYSRPVVIFNFANSSYVQYGQLGEDNEILLGNHRTEECQLPSLKIFIAGNSAYEYVDYLFKRMIDLSSISTVDSMIALDIDPLENTDFRVLELYSQKELRSSNVFDLEEIMREFNSYKQRVKYVEDKVVDPLPPYLKGLDDLMSGLGAAGKAVGVAIGAVGGAVASVVEGVATFLKNPFGAFTIILVAIAVVIITYLIYTRQRRLCTQPLQNLFPYLVSADGTTVTSGSTKDTSLQAPPSYEESVYNSGRKGPGPPSSDASTAAPPYTNEQAYQMLLALARLDAEQRAQQNGTDSLDGQTGTQDKGQKPNLLDRLRHRKNGYRHLKDSDEEENV

SEQ ID NO: 125 - protein, 906 aa, Human cytomegalovirus
MESRIWCLVVCVNLCIVCLGAAVSSSTSHATSSTHNGSHTSRTTSAQTRSVSSQHVTSSEAVSHRANETIYNTTLKYGDVVGVNTTKYPYRVCSMAQGTDLIRFERNIVCTSMKPINEDLDEGIMVVYKRNIVAHTFKVRVYQKVLTFRRSYAYIHTTYLLGSNTEYVAPPMWEIHHINSHSQCYSSYSRVIAGTVFVAYHRDSYENKTMQLMPDDYSNTHSTRYVTVKDQWHSRGSTWLYRETCNLNCMVTITTARSKYPYHFFATSTGDVVDISPFYNGTNRNASYFGENADKFFIFPNYTIVSDFGRPNSALETHRSVAFLERADSVISWDIQDEKNVTCQLTFWEASERTIRSEAEDSYHFSSAKMTATFLSKKQEVNMSDSALDCVRDEAINKLQQIFNTSYNQTYEKYGNVSVFETTGGLVVFWQGIKQKSLVELERLANRSSLNLTHNRTKRSTNGNNATHLSNMESVHNLVYAQLQFTYDTLRGYINRALAQIAEAWCVDQRRSLEVFRELSKINPSAILSAIYNKPIAARFMGDVLGLASCVTINQTSVKVLRDMNVKESPGRCYSRPVVIFNFANSSYVQYGQLGEDNEILLGNHRTEECQLPSLKIFIAGNSAYEYVDYLFKRMIDLSSISTVDSMIALDIDPLENTDFRVLELYSQKELRSSNVFDLEEIMREFNSYKQRVKYVEDKVVDPLPPYLKGLDDLMSGLGAAGKAVGVAIGAVGGAVASVVEGVATFLKNPFGAFTIILVAIAVVIIIYLIYTRQRRLCTQPLQNLFPYLVSADGTTVTSGSTKDTSLQAPPSYEESVYNSGRKGPGPPSSDASTAAPPYTNEQAYQMLLALARLDAEQRAQQNGTDSLDGQTGTQDKGQKPNLLDRLRHRKNGYRHLKDSDEEENV

SEQ ID NO: 126 - protein, 906 aa, Human cytomegalovirus
MESRIWCLVVCVNLCIVCLGAAVSSSTSHATSSTHNGSHTSRTTSAQTRSVSSQHVTSSEAVSHRANETIYNTTLKYGDVVGVNTTKYPYRVCSMAQGTDLIRFERNIVCTSMKPINEDLDEGIMVVYKRNIVAHTFKVRVYQKVLTFRRSYAYIHTTYLLGSNTEYVAPPMWEIHHINSHSQCYSSYSRVIAGTVFVAYHRDSYENKTMQLMPDDYSNTHSTRYVTVKDQWHSRGSTWLYRETCNLNCMVTITTARSKYPYHFFATSTGDVVDISPFYNGTNRNASYFGENADKFFIFPNYTIVSDFGRPNSALETHRSVAFLERAESVISWDIQDEKNVTCQLTFWEASERTIRSEAEDSYHFSSAKMTATFLSKKQEVNMSDSALDCVRDEAINKLQQIFNTSYNQTYEKYGNVSVFETTGGLVVFWQGIKQKSLVELERLANRSSLNLTHNRTKRSTNGSNATHLSNMESVHNLVYAQLQFTYDTLRGYINRALAQIAEAWCVDQRRSLEVFRELSKINPSAILSAIYNKPIAARFMGDVLGLASCVTINQTSVKVLRDMNVKESPGRCYSRPVVIFNFANSSYVQYGQLGEDNEILLGNHRTEECQLPSLKIFIAGNSAYEYVDYLFKRMIDLSSISTVDSMIALDIDPLENTDFRVLELYSQKELRSSNVFDLEEIMREFNSYKQRVKYVEDKVVDPLPPYLKGLDDLMSGLGAAGKAVGVAIGAVGGAVASVVEGVATFLKNPFGAFTIILVAIAVVIIIYLIYTRQRRLCTQPLQNLFPYLVSADGTTVTSGSTKDTSLQAPPSYEESVYNSGRKGPGPPSSDASTAAPPYTNEQAYQMLLALARLDAEQRAQQNGTDSLDGQTGTQDKGQKPNLLDRLRHRKNGYRHLKDSDEEENV

SEQ ID NO: 127 - protein, 907 aa, Human cytomegalovirus
MESRIWCLVVCVNLCIVCLGAAVSSSSTRGTSATHSHHSSHTTSAAHSRSGSVSQRVTSSQTVSHGVNETIYNTTLKYGDVVGVNTTKYPYRVCSMAQGTDLIRFERNIVCTSMKPINEDLDEGIMVVYKRNIVAHTFKVRVYQKVLTFRRSYAYIHTTYLLGSNTEYVAPPMWEIHHINSHSQCYSSYSRVIAGTVFVAYHRDSYENKTMQLMPDDYSNTHSTRYVTVKDQWHSRGSTWLYRETCNLNCMVTITTARSKYPYHFFATSTGDVVDISPFYNGTNRNASYFGENADKFFIFPNYTIVSDFGRPNSALETHRLVAFLERADSVISWDIQDEKNVTCQLTFWEASERTIRSEAEDSYHFSSAKMTATFLSKKQEVNMSDSALDCVRDEAINKLQQIFNTSYNQTYEKYGNVSVFETTGGLVVFWQGIKQKSLVELERLANRSSLNLTHNRTKRSTDGNNATHLSNMESVHNLVYAQLQFTYDTLRGYINRALAQIAEAWCVDQRRTLEVFKELSKINPSAILSAIYNKPIAARFMGDVLGLASCVTINQTSVKVLRDMNVKESPGRCYSRPVVIFNFANSSYVQYGQLGEDNEILLGNHRTEECQLPSLKIFIAGNSAYEYVDYLFKRMIDLSSISTVDSMIALDIDPLENTDFRVLELYSQKELRSSNVFDLEEIMREFNSYKQRVKYVEDKVVDPLPPYLKGLDDLMSGLGAAGKAVGVAIGAVGGAVASVVEGVATFLKNPFGAFTIILVAIAVVIITYLIYTRQRRLCTQPLQNLFPYLVSADGTTVTSGSTKDTSLQAPPSYEESVYNSGRKGPGPPSSDASTAAPPYTNEQAYQMLLALARLDAEQRAQQNGTDSLDGQTGTQDKGQKPNLLDRLRHRKNGYRHLKDSDEEENV

SEQ ID NO: 128 - protein, 907 aa, Human cytomegalovirus
MESRIWCLVVCVNLCIVRLGAAVSSSSTRGTSATHSHHSSRTTSAAHSRSGSVSQRVTSSQTVSHGVNETIYNTTLKYGDVVGVNTTKYPYRVCSMAQGTDLIRFERNIVCTSMKPINEDLDEGIMVVYKRNIVAHTFKVRVYQKVLTFRRSYAYIHTTYLLGSNTEYVAPPMWEIHHINSHSQCYSSYSRVIAGTVFVAYHRDSYENKTMQLMPDDYSNTHSTRYVTVKDQWHSRGSTWLYRETCNLNCMVTITTARSKYPYHFFATSTGNVVDISPFYNGTNRNASYFGENADKFFIFPNYTIVSDFGRPNSALETHRLVAFLERADSVISWDIQDEKNVTCQLTFWEASERTIRSEAEDSYHFSSAKMTATFLSKKQEVNMSDSALDCVRDEAINKLQQIFNTSYNQTYEKYGNVSVFETTGGLVVFWQGIKQKSLVELERLANRSSLNLTHNRTKRSTDGNNATHLSNMESVHNLVYAQLQFTYDTLRGYINRALAQIAEAWCVDQRRTLEVFKELSKINPSAILSAIYNKPIAARFMGDVLGLASCVTINQTSVKVLRDMNVKESPGRCYSRPVVIFNFANSSYVQYGQLGEDNEILLGNHRTEECQLPSLKIFIAGNSAYEYVDYLFKRMIDLSSISTVDSMIALDIDPLENTDFRVLELYSQKELRSSNVFDLEEIMREFNSYKQRVKYVEDKVVDPLPPYLKGLDDLMSGLGAAGKAVGVAIGAVGGAVASVVEGVATFLKNPFGAFTIILVAIAVVIITYLIYTRQRRLCTQPLQNLFPYLVSADGTTVTSGSTKDTSLQAPPSYEESVYNSGRKGPGPPSSDASTAAPPYTNEQAYQMLLALARLDAEQRAQQNGTDSLDGQTGTQDKGQKPNLLDRLRHRKNGYRHLKDSDEEENV

SEQ ID NO: 129 - protein, 907 aa, Human cytomegalovirus; identical to SEQ ID NO: 46

SEQ ID NO: 130 - protein, 907 aa, Human cytomegalovirus
MESRIWCLVVCVNLCIVCLGAAVSSSSTRGTSATHSHHSSHTTSAAHSRSGSVSQRVTSSQTVSHGVNETIYNTTLKYGDVVGVNTTKYPYRVCSMAQGTDLIRFERNIVCTSMKPINEDLDEGIMVVYKRNIVAHTFKVRVYQKVLTFRRSYAYIHTTYLLGSNTEYVAPPMWEIHHINSHSQCYSSYSRVIAGTVFVAYHRDSYENKTMQLMPDDYSNTHSTRYVTVKDQWHSRGSTWLYRETCNLNCMVTITTARSKYPYHFFATSTGDVVDISPFYNGTNRNASYFGENADKFFIFPNYTIVSDFGRPNSALETHRLVAFLERADSVISWDIQDEKNVTCQLTFWEASERTIRSEAEDSYHFSSAKMTATFLSKKQEVNMSDSALDCVRDEAINKLQQIFNTSYNQTYEKYGNVSVFETTGGLVVFWQGIKQKSLVELERLANRSSLNLTHNRTKRSTDGNNATHLSNMESVHNLVYAQLQFTYDTLRGYINRALAQIAEAWCVDQRRTLEVFKELSKINPSAILSAIYNKPIAARFMGDVLGLASCVTINQTSVKVLRDMNVKESPGRCYSRPVVIFNFANSSYVQYGQLGEDNEILLGNHRTEECQLPSLKIFIAGNSAYEYVDYLFKRMIDLSSISTVDSMIALDIDPLENTDFRVLELYSQKELRSSNVFDLEEIMREFNSYKQRVKYVEDKVVDPLPPYLKGLDDLMSGLGAAGKAVGVAIGAVGGAVASVVEGVATFLKNPFGAFTIILVAIAVVIITYLIYTRQRRLCTQPLQNLFPYLVSADGTTVTLGSTKDTSLQAPPSYEESVYNSGRKGPGPPSSDASTAAPPYTNEQAYQMLLALARLDAEQRAQQNGTDSLDGQTGTQDKGQKPNLLDRLRHRKNGYRHLKDSDEEENV

SEQ ID NO: 131 - protein, 907 aa, Human cytomegalovirus
MESRIWCLVVCVNLCIVCLGAAVSSSSTRGTSATHSHHSSHTTSAAHSRSGSVSQRVTSSQTVSHGVNETIYNTTLKYGDVVGVNTTKYPYRVCSMAQGTDLIRFERNIVCTSMKPINEDLDEGIMVVYKRNIVAHTFKVRVYQKVLTFRRSYAYIHTTYLLGSNTEYVAPPMWEIHHINSHSQCYSSYSRVIAGTVFVAYHRDSYENKTMQLMPDDYSNTHSTRYVTVKDQWHSRGSTWLYRETCNLNCMVTITTARSKYPYHFFATSTGDVVDISPFYNGTNRNASYFGENADKFFIFPNYTIVSDFGRPNSALETHRLVAFLERADSVISWDIQDEKNVTCQLTFWEASERTIRSEAEDSYHFSSAKMTATFLSKKQEVNMSDSVLDCVRDEAINKLQQIFNTSYNQTYEKYGNVSVFETTGGLVVFWQGIKQKSLVELERLANRSSLNLTHNRTKRSTDGNNATHLSNMESVHNLVYAQLQFTYDTLRGYINRALAQIAEAWCVDQRRTLEVFKELSKINPSAILSAIYNKPIAARFMGDVLGLASCVTINQTSVKVLRDMNVKESPGRCYSRPVVIFNFANSSYVQYGQLGEDNEILLGNHRTEECQLPSLKIFIAGNSAYEYVDYLFKRMIDLSSISTVDSMIALDIDPLENTDFRVLELYSQKELRSSNVFDLEEIMREFNSYKQRVKYVEDKVVDPLPPYLKGLDDLMSGLGAAGKAVGVAIGAVGGAVASVVEGVATFLKNPFGAFTIILVAIAVVIITYLIYTRQRRLCTQPLQNLFPYLVSADGTTVTSGSTKDTSLQAPPSYEESVYNSGRKGPGPPSSDASTAAPPYTNEQAYQMLLALARLDAEQRAQQNGTDSLDGQTGTQDKGQKPNLLDRLRHRKNGYRHLKDSDEEENV

SEQ ID NO: 132 - protein, 908 aa, Human cytomegalovirus
MESRIWCLVVCVNLCIVCLGAAVSSSSTSRGTSATHSHHSSHTTSAAHSRSGSVSQRVTSSQTVSHGVNETIYNTTLKYGDVVGVNTTKYPYRVCSMAQGTDLIRFERNIVCTSMKPINEDLDEGIMVVYKRNIVAHTFKVRVYQKVLTFRRSYAYIHTTYLLGSNTEYVAPPMWEIHHINSHSQCYSSYSRVIAGTVFVAYHRDSYENKTMQLMPDDYSNTHSTRYVTVKDQWHSRGSTWLYRETCNLNCMVTITTARSKYPYHFFATSTGDVVDISPFYNGTNRNASYFGENADKFFIFPNYTIVSDFGRPNSALETHRLVAFLERADSVISWDIQDEKNVTCQLTFWEASERTIRSEAEDSYHFSSAKMTATFLSKKQEVNMSDSALDCVRDEAINKLQQIFNTSYNQTYEKYGNVSVFETTGGLVVFWQGIKQKSLVELERLANRSSLNLTHSRTKRSADGNNATHLSSMESVHNLVYAQLQFTYDTLRGYINRALAQIAEAWCVDQRRSLEVFKELSKINPSAILSAIYNKPIAARFMGDVLGLASCVTINQTSVKVLRDMNVKDSPGRCYSRPVVIFNFANSSYVQYGQLGEDNEILLGNHRTEECQLPSLKIFIAGNSAYEYVDYLFKRMIDLSSISTVDSMIALDIDPLENTDFRVLELYSQKELRSSNVFDLEEIMREFNSYKQRVKYVEDKVVDPLPPYLKGLDDLMSGLGAAGKAVGVAIGAVGGAVASVVEGVATFLKNPFGAFTIILVAIAVVIITYLIYTRQRRLCMQPLQNLFPYLVSANGTTVTSGNTKDTSLQAPPSYEESVYNSGRKGSGPPSSDASTAAPPYTNEQAYQMLLALVRLDAEQRAQQNGTDSLDGQTGTQDKGQKPNLLDRLRHRKNGYRHLKDSDEEENV

SEQ ID NO: 133 - protein, 907 aa, Human cytomegalovirus
MESRIWCLVVCVNLCIVCLGAAVSSSSTRGTSATHSHHSSHTTSAAHSRSGSVSQRVTSSQTVSHGVNETIYNTTLKYGDVVGVNTTKYPYRVCSMAQGTDLIRFERNIVCTSMKPINEDLDEGIMVVYKRNIVAHTFKVRVYQKVLTFRRSYAYIHTTYLLGSNTEYVAPPMWEIHHINSHSQCYSSYSRVIAGTVFVAYHRDSYENKTMQLMPDDYSNTHSTRYVTVKDQWHSRGSTWLYRETCNLNCMVTITTARSKYPYHFFATSTGDVVDISPFYNGTNRNASYFGENADKFFIFPNYTIVSDFGRPNSALETHRLVAFLERADSVISWDIQDEKNVTCQLTFWEAPERTIRSEAEDSYHFSSAKMTATFLSKKQEVNMSDSALDCVRDEAINKLQQIFNTSYNQTYEKYGNVSVFETTGGLVVFWQGIKQKSLVELERLANRSSLNLTHNRTKRSTDGNNATHLSNMESVHNLVYAQLQFTYDTLRGYINRALAQIAEAWCVDQRRTLEVFKELSKINPSAILSAIYNKPIAARFMGDVLGLASCVTINQTSVKVLRDMNVKESPGRCYSRPVVIFNFANSSYVQYGQLGEDNEILLGNHRTEECQLPSLKIFIAGNSAYEYVDYLFKRMIDLSSISTVDSMIALDIDPLENTDFRVLELYSQKELRSSNVFDLEEIMREFNSYKQRVKYVEDKVVDPLPPYLKGLDDLMSGLGAAGKAVGVAIGAVGGAVASVVEGVATFLKNPFGAFTIILVAIAVVIITYLIYTRQRRLCTQPLQNLFPYLVSADGTTVTSGSTKDTSLQAPPSYEESVYNSGRKGPGPPSSDASTAAPPYTNEQAYQMLLALARLDAEQRAQQNGTDSLDGRTGTQDKGQKPNLLDRLRHRKNGYRHLKDSDEEENV

SEQ ID NO: 134 - protein, 907 aa, Human cytomegalovirus
MESRIWCLVVCVNLCIVCLGAAVSSSSTRGTSATHSHHSSHTTSAAHSRSGSVSQRVTSSQTVSHGVNETIYNTTLKYGDVVGVNTTKYPYRVCSMAQGTDLIRFERNIVCTSMKPINEDLDEGIMVVYKRNIVAHTFKVRVYQKVLTFRRSYAYIHTTYLLGSNTEYVAPPMWEIHHINSHSQCYSSYSRVIAGTVFVAYHRDSYENKTMQLMPDDYSNTHSTRYVTVKDQWHSRGSTWLYRETCNLNCMVTITTARSKYPYHFFATSTGDVVDISPFYNGTNRNASYFGENADKFFIFPNYTIVSDFGRANSAPETHRLVAFLERADSVISWDIQDEKNVTCQLTFWEASERTIRSEAEDSYHFSSAKMTATFLSKKQEVNMSDSVLDCVRDEAINKLQQIFNTSYNQTYEKYGNVSVFETTGGLVVFWQGIKQKSLVELERLANRSSLNLTHSRAKRSADGNNTTHLSNMESVHNLVYAQLQFTYDTLRGYINRALAQIAEAWCVDQRRSLEVFRELSKINPSAILSAIYNKPIAARFMGDVLGLASCVTINQTSVKVLRDMNVKESPGRCYSRPVVIFNFANSSYVQYGQLGEDNEILLGNHRTEECQLPSLKIFIAGNSAYEYVDYLFKRMIDLSSISTVDSMIALDIDPLENTDFRVLELYSQKELRSSNVFDLEEIMREFNSYKQRVKYVEDKVVDPLPPYLKGLDDLMSGLGAAGKAVGVAIGAVGGAVASVVEGVATFLKNPFGAFTIILVAIAVVIITYLIYTRQRRLCTQPLQNLFPYLVSADGTTVTSGSTKDTSLQAPPSYEESVYNSGRKGPGPPSSDASTAAPPYTNEQAYQMLLALARLDAEQRAQQNGTDSLDGQTGTQDKGQKPNLLDRLRHRKNGYRHLKDSDEEENV

SEQ ID NO: 135 - protein, 905 aa, Human cytomegalovirus
MESRIWCLVVCVNLCIVCLGAAVSSSTSRATSTHNGSHISRTTSAQTRSISSQRVTSSEAVSHRANETIYNTTLKYGDVVGVNTTKYPYRVCSMAQGTDLIRFDRNIVCTPMKPINEDLDEGIMVVYKRNIVAHTFKVRVYQKVLTFRRSYAYIHTTYLLGSNTEYVAPPMWEIHHINRHSQCYSSYSRVIAGTVFVAYHRDSYENKTMQLMPDDYSNTHSTRYVTVKDQWHSRGSTWLYRETCNLNCMVTITTARSKYPYHFFATSTGDVVDISPFYNGTNRNASYFGENADKFFIFPNYTIVSDFGRPNSALETHRLVAFLERADSVISWDIQDEKNVTCQLTFWEASERTIRSEAEESYHFSSAKMTATFLSKKQEVNMSDSALDCVRDEALNKLQQIFNTSYNQTYEKYGNVSVFETTGGLVVFWQGIKQKSLVELERLANRSSLNLTHSRTRRSTDGTNVTHLSNMDSVHNLVYAQLQFTYDTLRGYINRALTQIAEAWCVDQRRTLEVFKELSKINPSAILSAIYNKPIAARFMGDVLGLASCVTINQTSVKVLRDMNVKESPGRCYSRPVVIFNFANSSYVQYGQLGEDNEILLGNHRTEECQLPSLKIFIAGNSAYEYVDYLFKRMIDLSSISTVDSMIALDIDPLENTDFRVLELYSQKELRSSNVFDLEEIMREFNSYKQRVKYVEDKVVDPLPPYLKGLDDLMSGLGAAGKAVGVAIGAVGGAVASVVEGVATFLKNPFGAFTIILVAIAVVIITYLIYTRQRRLCTQPLQNLFPYLVSADGTTVTSGSTKDTSLQAPPSYEESVYNSGRKGPGPPSSDASTAAPPYTNEQAYQMLLALARLDAEQRAQQNGTDSLDGQTGTQDKGQKPNLLDRLRHRKNGYRHLKDSDEEENV

SEQ ID NO: 136 - protein, 905 aa, Human cytomegalovirus
MESRIWCLVVCVNLCIVCLGAAVSSSTSRATSTHNGNHTSHTTSAQTRSISSQRVTSSEAVSHRANETIYNTTLKYGDVVGVNTTKYPYRVCSMAQGTDLIRFDRNIVCTPMKPINEDLDEGIMVVYKRNIVAHTFKVRVYQKVLTFRRSYAYIHTTYLLGSNTEYVAPPMWEIHHINSHSQCYSSYSRVIAGTVFVAYHRDSYENKTMQLMPDDYSNTHSTRYVTVKDQWHSRGSTWLYRETCNLNCMVTITTARSKYPYHFFATSTGDVVDISPFYNGTNRNASYFGENADKFFIFPNYTIVSDFGRPNSALETHRLVAFLERADSVISWDIQDEKNVTCQLTFWEASERTIRSEAEESYHFSSAKMTATFLSKKQEVNMSDSALDCVRDEALNKLQQIFNASYNQTYEKYGNVSVFETTGGLVVFWQGIKQKSLVELERLANRSSLNLTHSRTRRSTDGTNVTHLSNMDSVHNLVYAQLQFTYDTLRGYINRALTQIAEAWCVDQRRTLEVFKELSKINPSAILSAIYNKPIAARFMGDVLGLASCVTINQTSVKVLRDMNVKESPGRCYSRPVVIFNFANSSYVQYGQLGEDNEILLGNHRTEECQLPSLKIFIAGNSAYEYVDYLFKRMIDLSSISTVDSMIALDIDPLENTDFRVLELYSQKELRSSNVFDLEEIMREFNSYKQRVKYVEDKVVDPLPPYLKGLDDLMSGLGAAGKAVGVAIGAVGGAVASVVEGVATFLKNPFGAFTIILVAIAVVIIIYLIYTRQRRLCMQPLQNLFPYLVSADGTTVTSGNTKDTSLQAPPSYEESVYNSGRKGPGPPSSDASTAAPPYTNEQAYQMLLALVRLDAEQRAQQNGTDSLDGQTGTQDKGQKPNLLDRLRHRKNGYRHLKDSDEEENV

SEQ ID NO: 137 - protein, 907 aa, Human cytomegalovirus; identical to SEQ ID NO: 1

SEQ ID NO: 138 - protein, 907 aa, Human cytomegalovirus
MESRIWCLVVCVNLCIVCLGAAVSSSSTRGTSSTHSHHSSHTTSAAHSRSGSVSQRVTSSQTVSHGVNETIYNTTLRYGDVVGVNTTKYPYRVCSMAQGTDLIRFERNIVCTSMKPINEDLDEGIMVVYKRNIVAHTFKVRVYQKVLTFRRSYAYIHTTYLLGSNTEYVAPPMWEIHHINSHSQCYSSYSRVIAGTVFVAYHRDSYENKTMQLMPDDYSNTHSTRYVTVKDQWHSRGSTWLYRETCNLNCMVTITTARSKYPYHFFATSTGDVVDISPFYNGTNRNASYFGENADKFFIFPNYTIVSDFGRPNSALETHRLVAFLERADSVISWDIQDEKNVTCQLTFWEASERTIRSEAEDSYHFSSAKMTATFLSKKQEVNMSDSALDCVRDEAINKLQQIFNTSYNQTYEKYGNVSVFETTGGLVVFWQGIKQKSLVELERLANRSSLNLTHNRTKRSIDGNNATHLSNMESVHNLVYAQLQFTYDTLRGYINRALAQIAEAWCVDQRRTLEVFKELSKINPSAILSAIYNKPIAARFMGDVLGLASCVTINQTSVKVLRDMNVKESPGRCYSRPVVIFNFANSSYVQYGQLGEDNEILLGNHRTEECQLPSLKIFIAGNSAYEYVDYLFKRMIDLSSISTVDSMIALDIDPLENTDFRVLELYSQKELRSSNVFDLEEIMREFNSYKQRVKYVEDKVVDPLPPYLKGLDDLMSGLGAAGKAVGVAIGAVGGAVASVVEGVATFLKNPFGAFTIILVAIAVVIIIYLIYTRQRRLCMQPLQNLFPYLVSADGTTVTSGNTKDTSLQAPPSYEESVYNSGRKGPGPPSSDASTAAPPYTNEQAYQMLLALARLDAEQRAQQNGTDSLDGQTGTQDKGQKPNLLDRLRHRKNGYRHLKDSDEEENV

SEQ ID NO: 139 - protein, 907 aa, Human cytomegalovirus
MESRIWCLVVCVNLCIVCLGAAVSSSSTTGSRGTSTHNHHSSHTTSAARSQSGSVSHHVTSSQTVSHDVNETIYNTTLKYGDVVGVNTTKYPYRVCSMAQGTDLIRFERNIVCTPVKPINEDLDEGIMVVYKRNIVAHTFKVRVYQKVLTFRRSYAYIYSTYLLGSNTEYVAPPMWEIHHINKFAQCYSSYSRVIAGTLFVAYHRDSYENKTMQLMSDDYSNTHSTRYVTVKDQWHSRGSTWLYHETCNLNCMVTMTAARSKYPYHFFATSTGDVVDISPFYNGTNRNTSYFGENADKFFIFPNYTIVSDFGRPNAAQETHRLVAFLERADSVISWDIQDEKNVTCQLTFWEASERTIRSEAKDSYHFSSAKMTATFLSKKQEVNMSDPVLDCVRDQALNKLQQIFNASYNQTYEKYGNVSVFETTGGLVVFWQGIKQKSLLELERLANSSGVNATRRSKRSTNNTTTLSLENDSVRSVLYAQLQFTYDTLRNYINRALAQIAEAWCVDQRRTLEVFKELSKINPSAILSAIYNKPIAARFMGDVLGLASCVTINQTSVKVLRDMTIKDSTGRCYSRPVVIFTFANSSHVQYGQLGEDNEILLGNHRTEECQLPSLKIFIAGNSAYEYVDYLFKRMIDLSSISTVDSMIALDIDPLENTDFRVLELYSQKELRSSNVFDLEEIMREFNSYKQRVKYVEDKVVDPLPPYLKGLDDLMSGLGAAGKAVGVAIGAVGGAVASVVEGVATFLKNPFGAFTIILVAIAVVIITYLIYTRQRRLCTQPLQNLFPYLVSADGTTVTSGSTKDTSLQAPPSYEESVYNSGRKGPGPPSSDASTAAPPYTNEQAYQMLLALARLDAEQRAQQNGTDSLDGQTGTQDKGQKPNLLDRLRHRKNGYRHLKDSDEEENV

SEQ ID NO: 140 - protein, 907 aa, Human cytomegalovirus
MESRIWCLVVCVNLCIVCLGAAVSSSSTTGSRGTSTHNHHSSHTTSAARSQSGSVSHHVTSSQTVSHDVNETIYNTTLKYGDVVGVNTTKYPYRVCSMAQGTDLIRFERNIVCTPVKPINEDLDEGIMVVYKRNIVAHTFKVRVYQKVLTFRRSYAYIYSTYLLGSNTEYVAPPMWEIHHINKFAQCYSSYSRVIAGTLFVAYHRDSYENKTMQLMSDDYSNTHSTRYVTVKDQWHSRGSTWLYHETCNLNCMVTMTAARSKYPYHFFATSTGDVVDISPFYNGTNRNTSYFGENADKFFIFPNYTIVSDFGRPNAAQETHRLVAFLERADSVISWDIQDEKNVTCQLTFWEASERTIRSEAKDSYHFSSAKMTATFLSKKQEVNMSDPVLDCVRDQALNKLQQIFNASYNQTYEKYGNVSVFETTGGLVVFWQGIKQKSLLELERLANSSGVNATRRSKRSTNNTTTLSLENDSVRSVLYAQLQFTYDTLRNYINRALAQIAEAWCVDQRRTLEVFKELSKINPSAILSAIYNKPIAARFMGDVLGLASCVTINQTSVKVLRDMTIKDSTGRCYSRPVVIFTFANSSHVQYGQLGEDNEILLGNHRTEECQLPSLKIFIAGNSAYEYVDYLFKRMIDLSSISTVDSMIALDIDPLENTDFRVLELYSQKELRSSNVFDLEEIMREFNSYKQRVKYVEDKVVDPLPPYLKGLDDLMSGLGAAGKAVGVAIGAVGGAVASVVEGVATFLKNPFGAFTIILVAIAVVIITYLIYTRQRRLCTQPLQNLFPYLVSADGTTVTSGSTKDTSLQAPPSYEESVYNSGRKGPGPPSSDASTAAQPYTNEQAYQMLLALARLDAEQRAQQNGTDSLNGQTGTQDKGQKPNLLDRLRHRKNGYRHLKDSDEEENV

SEQ ID NO: 141 - DNA, 2437 bp, Artificial Sequence
  Synthetic nucleotide sequence
tcaagcttttggaccctcgtacagaagctaatacgactcactatagggaaataagagagaaaagaagagtaagaagaaatataagagccaccatgcggccaggcctcccctcctacctcatcatcctcgccgtctgtctcttcagccacctactttcgtcacgatatggcgcagaagccgtatccgaaccgctggacaaagcgtttcacctactgctcaacacctacgggagacccatccgcttcctgcgtgaaaataccacccagtgtacctacaacagcagcctccgtaacagcacggtcgtcagggaaaacgccatcagtttcaacttcttccaaagctataatcaatactatgtattccatatgcctcgatgtctctttgcgggtcctctggcggagcagtttctgaaccaggtagatctgaccgaaaccctggaaagataccaacagagacttaacacttacgcgctggtatccaaagacctggccagctaccgatctttctcgcagcagctaaaggcacaagacagcctaggtgaacagcccaccactgtgccaccgcccattgacctgtcaatacctcacgtttggatgccaccgcaaaccactccacacggctggacagaatcacataccacctcaggactacaccgaccacactttaaccagacctgtatcctctttgatggacacgatctactattcagcaccgtcacaccttgtttgcaccaaggcttttacctcatcgacgaactacgttacgttaaaataacactgaccgaggacttcttcgtagttacggtgtccatagacgacgacacacccatgctgcttatcttcggccatcttccacgcgtacttttcaaagcgccctatcaacgcgacaactttatactacgacaaactgagaaacacgagctcctggtgctagttaagaaagatcaactgaaccgtcactcttatctcaaagacccggactttcttgacgccgcacttgacttcaactacctagacctcagcgcactactacgtaacagctttcaccgttacgccgtggatgtactcaagagcggtcgatgtcagatgctggaccgccgcacggtagaaatggccttcgcctacgcattagcactgttcgcagcagcccgacaagaagaggccggcgcccaagtctccgtcccacgggccctagaccgccaggccgcactcttacaaatacaagaatttatgatcacctgcctctcacaaacaccaccacgcaccacgttgctgctgtatcccacggccgtggacctggccaaacgagccctttggacaccgaatcagatcaccgacatcaccagcctcgtacgcctggtctacatactctctaaacagaatcagcaacatctcatcccccaatgggcactacgacagatcgccgactttgccctaaaactacacaaaacgcacctggcctcttttctttcagccttcgcacgccaagaactctacctcatgggcagcctcgtccactccatgctggtacatacgacggagagacgcgaaatcttcatcgtagaaacgggcctctgttcattggccgagctatcacactttacgcagttgttagctcatccacaccacgaatacctcagcgacctgtacacaccctgttccagtagcgggcgacgcgatcactcgctcgaacgcctcacgcgtctcttccccgatgccaccgtccccgctaccgttcccgccgccctctccatcctatctaccatgcaaccaagcacgctggaaaccttccccgacctgttttgcttgccgctcggcgaatccttctccgcgctgaccgtctccgaacacgtcagttatatcgtaacaaaccagtacctgatcaaaggtatctcctaccctgtctccaccaccgtcgtaggccagagcctcatcatcacccagacggacagtcaaactaaatgcgaactgacgcgcaacatgcataccacacacagcatcacagtggcgctcaacatttcgctagaaaactgcgccttttgccaaagcgccctgctagaatacgacgacacgcaaggcgtcatcaacatcatgtacatgcacgactcggacgacgtccttttcgccctggatccctacaacgaagtggtggtctcatctccgcgaactcactacctcatgcttttgaagaacggtacggtactagaagtaactgacgtcgtcgtggacgccaccgacagtcgtctcctcatgatgtccgtctacgcgctatcggccatcatcggcatctatctgctctaccgcatgctcaagacatgctgataataggctggagcctcggtggccatgcttcttgccccttgggcctccccccagcccctcctccccttcctgcacccgtacccccgtggtctttgaataaagtctgagtgggcggc

SEQ ID NO: 142 - DNA, 1045 bp, Artificial Sequence
  Synthetic nucleotide sequence
tcaagcttttggaccctcgtacagaagctaatacgactcactatagggaaataagagagaaaagaagagtaagaagaaatataagagccaccatgtgccgccgcccggattgcggcttctctttctcacctggaccggtgatactgctgtggtgttgccttctgctgcccattgtttcctcagccgccgtcagcgtcgctcctaccgccgccgagaaagtccccgcggagtgccccgaactaacgcgccgatgcttgttgggtgaggtgtttgagggtgacaagtatgaaagttggctgcgcccgttggtgaatgttaccgggcgcgatggcccgctatcgcaacttatccgttaccgtcccgttacgccggaggccgccaactccgtgctgttggacgaggctttcctggacactctggccctgctgtacaacaatccggatcaattgcgggccctgctgacgctgttgagctcggacacagcgccgcgctggatgacggtgatgcgcggctacagcgagtgcggcgatggctcgccggccgtgtacacgtgcgtggacgacctgtgccgcggctacgacctcacgcgactgtcatacgggcgcagcatcttcacggaacacgtgttaggcttcgagctggtgccaccgtctctctttaacgtggtggtggccatacgcaacgaagccacgcgtaccaaccgcgccgtgcgtctgcccgtgagcaccgctgccgcgcccgagggcatcacgctcttttacggcctgtacaacgcagtgaaggaattctgcctgcgtcaccagctggacccgccgctgctacgccacctagataaatactacgccggactgccgcccgagctgaagcagacgcgcgtcaacctgccggctcactcgcgctatggccctcaagcagtggatgctcgctgataataggctggagcctcggtggccatgcttcttgccccttgggcctccccccagcccctcctccccttcctgcacccgtacccccgtggtctttgaataaagtctgagtgggcggc

SEQ ID NO: 143 - DNA, 724 bp, Artificial Sequence
  Synthetic nucleotide sequence
tcaagcttttggaccctcgtacagaagctaatacgactcactatagggaaataagagagaaaagaagagtaagaagaaatataagagccaccatgagtcccaaagatctgacgccgttcttgacggcgttgtggctgctattgggtcacagccgcgtgccgcgggtgcgcgcagaagaatgttgcgaattcataaacgtcaaccacccgccggaacgctgttacgatttcaaaatgtgcaatcgcttcaccgtcgcgctgcggtgtccggacggcgaagtctgctacagtcccgagaaaacggctgagattcgcgggatcgtcaccaccatgacccattcattgacacgccaggtcgtacacaacaaactgacgagctgcaactacaatccgttatacctcgaagctgacgggcgaatacgctgcggcaaagtaaacgacaaggcgcagtacctgctgggcgccgctggcagcgttccctatcgatggatcaatctggaatacgacaagataacccggatcgtgggcctggatcagtacctggagagcgttaagaaacacaaacggctggatgtgtgccgcgctaaaatgggctatatgctgcagtgataataggctggagcctcggtggccatgcttcttgccccttgggcctccccccagcccctcctccccttcctgcacccgtacccccgtggtctttgaataaagtctgagtgggcggc

SEQ ID NO: 144 - DNA, 846 bp, Artificial Sequence
  Synthetic nucleotide sequence
tcaagcttttggaccctcgtacagaagctaatacgactcactatagggaaataagagagaaaagaagagtaagaagaaatataagagccaccatgctgcggcttctgcttcgtcaccactttcactgcctgcttctgtgcgcggtttgggcaacgccctgtctggcgtctccgtggtcgacgctaacagcaaaccagaatccgtccccgccatggtctaaactgacgtattccaaaccgcatgacgcggcgacgttttactgtccttttctctatccctcgcccccacgatcccccttgcaattctcggggttccagcgggtatcaacgggtcccgagtgtcgcaacgagaccctgtatctgctgtacaaccgggaaggccagaccttggtggagagaagctccacctgggtgaaaaaggtgatctggtacctgagcggtcggaaccaaaccatcctccaacggatgccccgaacggcttcgaaaccgagcgacggaaacgtgcagatcagcgtggaagacgccaagatttttggagcgcacatggtgcccaagcgctgctacgcttcgtcgtcaacgatggcacacgttatcagatgtgtgtgatgaagctggagagctgggctcacgtcttccgggactacagcgtgtcttttcaggtgcgattgacgttcaccgaggccaataaccagacttacaccttctgcacccatcccaatctcatcgtttgataataggctggagcctcggtggccatgcttcttgccccttgggcctccccccagcccctcctccccttcctgcacccgtacccccgtggtctttgaataaagtctgagtgggcggc

SEQ ID NO: 145 - DNA, 598 bp, Artificial Sequence
  Synthetic nucleotide sequence
tcaagcttttggaccctcgtacagaagctaatacgactcactatagggaaataagagagaaaagaagagtaagaagaaatataagagccaccatgcggctgtgtcgggtgtggctgtctgtttgtctgtgcgccgtggtgctgggtcagtgccagcgggaaaccgcggaaaagaacgattattaccgagtaccgcattactgggacgcgtgctctcgcgcgctgcccgaccaaacccgttacaagtatgtggaacagctcgtggacctcacgttgaactaccactacgatgcgagccacggcttggacaactttgacgtgctcaagagaatcaacgtgaccgaggtgtcgttgctcatcagcgactttagacgtcagaaccgtcgcggcggcaccaacaaaaggaccacgttcaacgccgccggttcgctggcgccacacgcccggagcctcgagttcagcgtgcggctctttgccaactgataataggctggagcctcggtggccatgcttcttgccccttgggcctccccccagcccctcctccccttcctgcacccgtacccccgtggtctttgaataaagtctgagtgggcggc

SEQ ID NO: 146 - DNA, 2933 bp, Artificial Sequence
  Synthetic nucleotide sequence
tcaagcttttggaccctcgtacagaagctaatacgactcactatagggaaataagagagaaaagaagagtaagaagaaatataagagccaccatggaatccaggatctggtgcctggtagtctgcgttaacttgtgtatcgtctgtctgggtgctgcggtttcctcatcttctactcgtggaacttctgctactcacagtcaccattcctctcatacgacgtctgctgctcactctcgatccggttcagtctctcaacgcgtaacttcttcccaaacggtcagccatggtgttaacgagaccatctacaacactaccctcaagtacggagatgtggtgggggtcaataccaccaagtacccctatcgcgtgtgttctatggcccagggtacggatcttattcgctttgaacgtaatatcgtctgcacctcgatgaagcccatcaatgaagacctggacgagggcatcatggtggtctacaaacgcaacatcgtcgcgcacacctttaaggtacgagtctaccagaaggttttgacgtttcgtcgtagctacgcttacatccacaccacttatctgctgggcagcaacacggaatacgtggcgcctcctatgtgggagattcatcatatcaacagccacagtcagtgctacagttcctacagccgcgttatagcaggcacggttttcgtggcttatcatagggacagctatgaaaacaaaaccatgcaattaatgcccgacgattattccaacacccacagtacccgttacgtgacggtcaaggatcaatggcacagccgcggcagcacctggctctatcgtgagacctgtaatctgaattgtatggtgaccatcactactgcgcgctccaaatatccttatcattttttcgccacttccacgggtgacgtggttgacatttctcctttctacaacggaaccaatcgcaatgccagctactttggagaaaacgccgacaagtttttcatttttccgaactacactatcgtctccgactttggaagaccgaattctgcgttagagacccacaggttggtggcttttcttgaacgtgcggactcggtgatctcctgggatatacaggacgaaaagaatgtcacttgtcaactcactttctgggaagcctcggaacgcaccattcgttccgaagccgaggactcgtatcacttttcttctgccaaaatgaccgccactttcttatctaagaagcaagaggtgaacatgtccgactctgcgctggactgcgtacgtgatgaggctataaataagttacagcagattttcaatacttcatacaatcaaacatatgaaaaatatggaaacgtgtccgtctttgaaaccactggtggtttggtagtgttctggcaaggtatcaagcaaaaatctctggtggaactcgaacgtttggccaaccgctccagtctgaatcttactcataatagaaccaaaagaagtacagatggcaacaatgcaactcatttatccaacatggaatcggtgcacaatctggtctacgcccagctgcagttcacctatgacacgttgcgcggttacatcaaccgggcgctggcgcaaatcgcagaagcctggtgtgtggatcaacggcgcaccctagaggtcttcaaggaactcagcaagatcaacccgtcagccattctctcggccatttacaacaaaccgattgccgcgcgtttcatgggtgatgtcttgggcctggccagctgcgtgaccatcaaccaaaccagcgtcaaggtgctgcgtgatatgaacgtgaaggagtcgccaggacgctgctactcacgacccgtggtcatctttaatttcgccaacagctcgtacgtgcagtacggtcaactgggcgaggacaacgaaatcctgttgggcaaccaccgcactgaggaatgtcagcttcccagcctcaagatcttcatcgccgggaactcggcctacgagtacgtggactacctcttcaaacgcatgattgacctcagcagtatctccaccgtcgacagcatgatcgccctggatatcgacccgctggaaaataccgacttcagggtactggaactttactcgcagaaagagctgcgttccagcaacgtttttgacctcgaagagatcatgcgcgaattcaactcgtacaagcagcgggtaaagtacgtggaggacaaggtagtcgacccgctaccgccctacctcaagggtctggacgacctcatgagcggcctgggcgccgcgggaaaggccgttggcgtagccattggggccgtgggtggcgcggtggcctccgtggtcgaaggcgttgccaccttcctcaaaaaccccttcggagcgttcaccatcatcctcgtggccatagctgtagtcattatcacttatttgatctatactcgacagcggcgtttgtgcacgcagccgctgcagaacctctttccctatctggtgtccgccgacgggaccaccgtgacgtcgggcagcaccaaagacacgtcgttacaggctccgccttcctacgaggaaagtgtttataattctggtcgcaaaggaccgggaccaccgtcgtctgatgcatccacggcggctccgccttacaccaacgagcaggcttaccagatgcttctggccctggcccgtctggacgcagagcagcgagcgcagcagaacggtacagattctttggacggacggactggcacgcaggacaagggacagaagcccaacctactagaccgactgcgacatcgcaaaaacggctaccgacacttgaaagactctgacgaagaagagaacgtcttgataataggctggagcctcggtggccatgcttcttgccccttgggcctccccccagcccctcctccccttcctgcacccgtacccccgtggtctttgaataaagtctgagtgggcggc

SEQ ID NO: 147 - DNA, 1882 bp, Artificial Sequence
  Synthetic nucleotide sequence
tcaagcttttggaccctcgtacagaagctaatacgactcactatagggaaataagagagaaaagaagagtaagaagaaatataagagccaccatggagtcgcgcggtcgccgttgtcccgaaatgatatccgtactgggtcccatttcggggcacgtgctgaaagccgtgtttagtcgcggcgatacgccggtgctgccgcacgagacgagactcctgcagacgggtatccacgtacgcgtgagccagccctcgctgatcctggtgtcgcagtacacgcccgactcgacgccatgccaccgcggcgacaatcagctgcaggtgcagcacacgtactttacgggcagcgaggtggagaacgtgtcggtcaacgtgcacaaccccacgggccgaagcatctgccccagccaagagcccatgtcgatctatgtgtacgcgctgccgctcaagatgctgaacatccccagcatcaacgtgcaccactacccgtcggcggccgagcgcaaacaccgacacctgcccgtagccgacgctgttattcacgcgtcgggcaagcagatgtggcaggcgcgtctcacggtctcgggactggcctggacgcgtcagcagaaccagtggaaagagcccgacgtctactacacgtcagcgttcgtgtttcccaccaaggacgtggcactgcggcacgtggtgtgcgcgcacgagctggtttgctccatggagaacacgcgcgcaaccaagatgcaggtgataggtgaccagtacgtcaaggtgtacctggagtccttctgcgaggacgtgccctccggcaagctctttatgcacgtcacgctgggctctgacgtggaagaggacctaacgatgacccgcaacccgcaacccttcatgcgcccccacgagcgcaacggctttacggtgttgtgtcccaaaaatatgataatcaaaccgggcaagatctcgcacatcatgctggatgtggcttttacctcacacgagcattttgggctgctgtgtcccaagagcatcccgggcctgagcatctcaggtaacctgttgatgaacgggcagcaaatcttcctggaggtacaagcgatacgcgagaccgtggaactgcgtcagtacgatcccgtggctgcgctcttctttttcgatatcgacttgttgctgcagcgcgggcctcagtacagcgagcaccccaccttcaccagccagtatcgcatccagggcaagcttgagtaccgacacacctgggaccggcacgacgagggtgccgcccagggcgacgacgacgtctggaccagcggatcggactccgacgaagaactcgtaaccaccgagcgtaagacgccccgcgtcaccggcggcggagccatggcgagcgcctccacttccgcgggctcagcatcctcggcgacggcgtgcacggcgggcgttatgacacgcggccgccttaaggccgagtccaccgtcgcgcccgaagaggacaccgacgaggattccgacaacgaaatccacaatccggccgtgttcacctggccgccctggcaggccggcatcctggcccgcaacctggtgcccatggtggctacggttcagggtcagaatctgaagtaccaggagttcttctgggacgccaacgacatctaccgcatcttcgccgaattggaaggcgtatggcagcccgctgcgcaacccaaacgtcgccgccaccggcaagacgccttgcccgggccatgcatcgcctcgacgcccaaaaagcaccgaggttgataataggctggagcctcggtggccatgcttcttgccccttgggcctccccccagcccctcctccccttcctgcacccgtacccccgtggtctttgaataaagtctgagtgggcggc

SEQ ID NO: 148 - DNA, 3364 bp, Artificial Sequence
  Synthetic nucleotide sequence
tcaagcttttggaccctcgtacagaagctaatacgactcactatagggaaataagagagaaaagaagagtaagaagaaatataagagccaccatggagtcgcgcggtcgccgttgtcccgaaatgatatccgtactgggtcccatttcggggcacgtgctgaaagccgtgtttagtcgcggcgatacgccggtgctgccgcacgagacgcgactcctgcagacgggtatccacgtacgcgtgagccagccctcgctgatcctggtgtcgcagtacacgcccgactcgacgccatgccaccgcggcgacaatcagctgcaggtgcagcacacgtactttacgggcagcgaggtggagaacgtgtcggtcaacgtgcacaaccccacgggccgaagcatctgccccagccaagagcccatgtcgatctatgtgtacgcgctgccgctcaagatgctgaacatccccagcatcaacgtgcaccactacccgtcggcggccgagcgcaaacaccgacacctgcccgtagccgacgctgttattcacgcgtcgggcaagcagatgtggcaggcgcgtctcacggtctcgggactggcctggacgcgtcagcagaaccagtggaaagagcccgacgtctactacacgtcagcgttcgtgtttcccaccaaggacgtggcactgcggcacgtggtgtgcgcgcacgagctggtttgctccatggagaacacgcgcgcaaccaagatgcaggtgataggtgaccagtacgtcaaggtgtacctggagtccttctgcgaggacgtgccctccggcaagctctttatgcacgtcacgctgggctctgacgtggaagaggacctaacgatgacccgcaacccgcaacccttcatgcgcccccacgagcgcaacggctttacggtgttgtgtcccaaaaatatgataatcaaaccgggcaagatctcgcacatcatgctggatgtggcttttacctcacacgagcattttgggctgctgtgtcccaagagcatcccgggcctgagcatctcaggtaacctgttgatgaacgggcagcaaatcttcctggaggtacaagcgatacgcgagaccgtggaactgcgtcagtacgatcccgtggctgcgctcttctttttcgatatcgacttgttgctgcagcgcgggcctcagtacagcgagcaccccaccttcaccagccagtatcgcatccagggcaagcttgagtaccgacacacctgggaccggcacgacgagggtgccgcccagggcgacgacgacgtctggaccagcggatcggactccgacgaagaactcgtaaccaccgagcgtaagacgccccgcgtcaccggcggcggcgccatggcgagcgcctccacttccgcgggccgcaaacgcaaatcagcatcctcggcgacggcgtgcacggcgggcgttatgacacgcggccgccttaaggccgagtccaccgtcgcgcccgaagaggacaccgacgaggattccgacaacgaaatccacaatccggccgtgttcacctggccgccctggcaggccggcatcctggcccgcaacctggtgcccatggtggctacggttcagggtcagaatctgaagtaccaggagttcttctgggacgccaacgacatctaccgcatcttcgccgaattggaaggcgtatggcagcccgctgcgcaacccaaacgtcgccgccaccggcaagacgccttgcccgggccatgcatcgcctcgacgcccaaaaagcaccgaggtgagtcctctgccaagagaaagatggaccctgataatcctgacgagggcccttcctccaaggtgccacggcccgagacacccgtgaccaaggccacgacgttcctgcagactatgttaaggaaggaggttaacagtcagctgagcctgggagacccgctgttcccagaattggccgaagaatccctcaaaacctttgaacaagtgaccgaggattgcaacgagaaccccgaaaaagatgtcctgacagaactcgtcaaacagattaaggttcgagtggacatggtgcggcatagaatcaaggagcacatgctgaaaaaatatacccagacggaagaaaaattcactggcgcctttaatatgatgggaggatgtttgcagaatgccttagatatcttagataaggttcatgagcctttcgaggacatgaagtgtattgggctaactatgcagagcatgtatgagaactacattgtacctgaggataagcgggagatgtggatggcttgtattaaggagctgcatgatgtgagcaagggcgccgctaacaagttggggggtgcactgcaggctaaggcccgtgctaaaaaggatgaacttaggagaaagatgatgtatatgtgctacaggaatatagagttctttaccaagaactcagccttccctaagaccaccaatggctgcagtcaggccatggcggcattgcagaacttgcctcagtgctctcctgatgagattatgtcttatgcccagaaaatctttaagattttggatgaggagagagacaaggtgctcacgcacattgatcacatatttatggatatcctcactacatgtgtggaaacaatgtgtaatgagtacaaggtcactagtgacgcttgtatgatgaccatgtacgggggcatctctctcttaagtgagttctgtcgggtgctgtgctgctatgtcttagaggagactagtgtgatgctggccaagcggcctctgataaccaagcctgaggttatcagtgtaatgaagcgccgcattgaggagatctgcatgaaggtctttgcccagtacattctgggggccgatcctttgagagtctgctctcctagtgtggatgacctacgggccatcgccgaggagtcagatgaggaagaggctattgtagcctacactttggccaccgctggtgccagctcctctgattctctggtgtcacctccagagtcccctgtacccgcgactatccctctgtcctcagtaattgtggctgagaacagtgatcaggaagaaagtgaacagagtgatgaggaacaggaggagggtgctcaggaggagcgggaggacactgtgtctgtcaagtctgagccagtgtctgagatagaggaagttgcctcagaggaagaggaggatggtgctgaggaacccaccgcctctggaggcaagagcacccaccctatggtgactagaagcaaggctgaccagtgataataggctggagcctcggtggccatgcttcttgccccttgggcctccccccagcccctcctccccttcctgcacccgtacccccgtggtctttgaataaagtctgagtgggcggc

SEQ ID NO: 149 - DNA, 3352 bp, Artificial Sequence
  Synthetic nucleotide sequence
tcaagcttttggaccctcgtacagaagctaatacgactcactatagggaaataagagagaaaagaagagtaagaagaaatataagagccaccatggagtcgcgcggtcgccgttgtcccgaaatgatatccgtactgggtcccatttcgggtcatgtgctgaaagcggtgtttagtcgcggcgatacgccagtactgccgcacgagacgcgactcctgcagacaggtatccacgtacgcgtgagccagccctcgctcatcctggtgtcgcagtacacgcccgactcgacgccatgccaccgcggcgacaatcagctgcaggtgcagcacacgtactttacgggcagcgaggtggagaacgtgtcggtcaacgtccacaaccccacgggtcgaagcatctgcccctctcaagagcccatgtcgatctatgtgtacgcgctgccgctcaagatgctgaacatcccgagcatcaacgtgcaccactacccgagcgcggccgagcgcaaacaccgacacctgcccgtagccgacgctgttattcacgcgtcgggcaagcagatgtggcaagcgcgcctcacggtctcgggactagcctggacgcgtcagcagaaccagtggaaagagcccgacgtctactacacgtcagcgttcgtgtttcccaccaaggacgtggcactgcgccacgtggtgtgtgcgcacgagctggtttgctccatggagaatacgcgcgcaaccaagatgcaggtgataggtgatcaatacgtcaaggtgtacctggagtccttctgcgaggatgtgccctccggtaagctctttatgcacgtcacgctgggctctgacgtggaagaggacctaacgatgacccgcaatccgcaacccttcatgcgcccccacgagcgcaacggctttacggtgttgtgtcctaaaaatatgataatcaaaccaggcaagatctcgcacatcatgctggatgtggcttttacctcacacgagcattttgggctgctgtgtcccaagagcatcccgggcctgagcatctcaggtaacctgttgatgaacgggcagcaaatctttctcgaggtgcaagctatacgcgagaccgtcgaactgcgtcagtacgatcccgtggctgcgctgttctttttcgatatcgacttgttgctgcagcgcgggcctcagtacagcgagcaccccaccttcaccagccagtatcgcatccagggcaagcttgagtaccgacacacctgggaccggcacgacgagggagccgcccagggcgacgacgacgtctggacctctggatcggactccgacgaagaactcgtaacgaccgagcgtaagaccccccgcgtcaccggcggcggcgccatggcgtccgcctcaacttccgcgggctcagcatcctcggctacggcgtgcacggcgggcgttatgacacgtggcagacttaaggccgagtccaccgtcgcgcccgaagaggacaccgacgaggattccgacaacgaaatccacaatccggccgtgttcacctggccgccctggcaggccggcatcctggcccgcaacctggtgcccatggtggctacggttcagggtcagaatctgaagtaccaggagttcttctgggacgccaacgacatctaccgcatcttcgccgaattggaaggcgtatggcagcccgctgcgcaacccaaacgtcgccgccaccggcaagacgccttgcccgggccatgcatcgcctcgacgcccaaaaagcaccgaggtgagtcctctgccaagagaaagatggaccctgataatcctgacgagggcccttcctccaaggtgccacggcccgagacacccgtgaccaaggccacgacgttcctgcagactatgttaaggaaggaggttaacagtcagctgagcctgggagacccgctgttcccagaattggccgaagaatccctcaaaacctttgaacaagtgaccgaggattgcaacgagaaccccgaaaaagatgtcctgacagaactcgtcaaacagattaaggttcgagtggacatggtgcggcatagaatcaaggagcacatgctgaaaaaatatacccagacggaagaaaaattcactggcgcctttaatatgatgggaggatgtttgcagaatgccttagatatcttagataaggttcatgagcctttcgaggacatgaagtgtattgggctaactatgcagagcatgtatgagaactacattgtacctgaggataagcgggagatgtggatggcttgtattaaggagctgcatgatgtgagcaagggcgccgctaacaagttggggggtgcactgcaggctaaggcccgtgctaaaaaggatgaacttaggagaaagatgatgtatatgtgctacaggaatatagagttctttaccaagaactcagccttccctaagaccaccaatggctgctcgcaggccatggcggcattgcagaacttgcctcagtgctctcctgatgagattatgtcttatgcccagaaaatctttaagattttggatgaggagcgagacaaggtgcttacgcacattgatcacatatttatggatatcctcactacatgtgttgaaacgatgtgcaatgagtacaaggtcactagtgacgcttgtatgatgaccatgtacgggggcatatctctcttaagtgaattctgtcgggtgctgtgctgctacgtcttagaggagactagtgtgatgctggccaagcggcctctgataaccaagcctgaggtcatcagtgtaatgaagcgccgcattgaggagatctgcatgaaggtctttgcccagtacattctgggggccgatcctttgagagtctgctctccaagtgtggatgacctacgggccatcgccgaggagtcagacgaggaagaggctattgtagcctacactttggccaccgctggtgccagctcctctgactctctggtgtcacctccagaatcccctgtgcccgcgacaatccctctgtcctcagtaattgtggctgagaacagtgatcaggaagaaagtgaacagagtgatgaggaacaggaggagggtgctcaggaggagcgggaggatactgtgtctgtcaagtctgagccagtgtctgaaattgaggaagttgcctcagaggaagaggaggatggtgctgaggaacccaccgcctctggaggcaagtccacccaccctatggtaactagatcaaaggctgaccagtgataataggctggagcctcggtggccatgcttcttgccccttgggcctccccccagcccctcctccccttcctgcacccgtacccccgtggtctttgaataaagtctgagtgggcggc

SEQ ID NO: 150 - DNA, 1473 bp, Artificial Sequence
  Synthetic nucleotide sequence
atggagtcctctgccaagagaaagatggaccctgataatcctgacgagggcccttcctccaaggtgccacggcccgagacacccgtgaccaaggccacgacgttcctgcagactatgttaaggaaggaggttaacagtcagctgagcctgggagacccgctgttcccagaattggccgaagaatccctcaagacctttgaacaagtgaccgaggattgcaacgagaaccccgagaaagatgtcctgacagaactcgtcaaacagattaaggttcgagtggacatggtgcggcatagaatcaaggagcacatgctgaagaaatatacccagacggaagagaaattcactggcgcctttaatatgatgggaggatgtttgcagaatgccttagatatcttagataaggttcatgagcctttcgaggacatgaagtgtattgggctaactatgcagagcatgtatgagaactacattgtacctgaggataagcgggagatgtggatggcttgtattaaggagctgcatgatgtgagcaagggcgccgctaacaagttgggcggtgcactgcaggctaaggcccgtgctaagaaggatgaacttaggagaaagatgatgtatatgtgctacaggaatatagagttctttaccaagaactcagccttccctaagaccaccaatggctgcagtcaggccatggcggcattgcagaacttgcctcagtgctctcctgatgagattatgtcttatgcccagaagatctttaagattttggatgaggagagagacaaggtgctcacgcacattgatcacatatttatggatatcctcactacatgtgtggaaacaatgtgtaatgagtacaaggtcactagtgacgcttgtatgatgaccatgtacggcggcatctctctcttaagtgagttctgtcgggtgctgtgctgctatgtcttagaggagactagtgtgatgctggccaagcggcctctgataaccaagcctgaggttatcagtgtaatgaagcgccgcattgaggagatctgcatgaaggtctttgcccagtacattctgggagccgatcctttgagagtctgctctcctagtgtggatgacctacgggccatcgccgaggagtcagatgaggaagaggctattgtagcctacactttggccaccgctggtgccagctcctctgattctctggtgtcacctccagagtcccctgtacccgcgactatccctctgtcctcagtaattgtggctgagaacagtgatcaggaagaaagtgaacagagtgatgaggaacaggaggagggtgctcaggaggagcgggaggacactgtgtctgtcaagtctgagccagtgtctgagatagaggaagttgcctcagaggaagaggaggatggtgctgaggaacccaccgcctctggaggcaagagcacccaccctatggtgactagaagcaaggctgaccag

SEQ ID NO: 151 - DNA, 1740 bp, Artificial Sequence
  Synthetic nucleotide sequence
atggagtcctctgccaagagaaagatggaccctgataatcctgacgagggcccttcctccaaggtgccacggcccgagacacccgtgaccaaggccacgacgttcctgcagactatgttaaggaaggaggttaacagtcagctgagcctgggagacccgctgttcccagaattggccgaagaatccctcaagacctttgaacaagtgaccgaggattgcaacgagaaccccgagaaagatgtcctgacagaactcggtgacatcctcgcccaggctgtcaatcatgccggtatcgattccagtagcaccggccccacgctgacaacccactcttgcagcgttagcagcgcccctcttaacaagccgacgcccaccagcgtcgcggttactaacactcctctccccggggcatccgctactcccgagctcagcccgcgtaagaaaccgcgcaagaccacgcgtcctttcaaggtgattattaaaccgcccgtgcctcccgcgcctatcatgctgcccctcatcaaacaggaagacatcaagcccgagcccgactttaccatccagtaccgcaacaagattatcgataccgccggctgtatcgtgatctctgatagcgaggaagaacagggtgaagaagtcgagacccgcggtgctaccgcgtcttccccttccaccggcagcggcacgccgcgagtgacctctcccacgcacccgctctcccagatgaaccaccctcctcttcccgatcctttgggccggcccgatgaagatagttcctcttcgtcttcctcctcctgcagttcggcttcggacagcgagagtgagtccgaggagatgaaatgcagcagtggcggaggagcatccgtgacctcgagccaccatgggcgcggcggttttggtggcgcggcctcctcctctctgctgagctgcggacatcagagcagcggcggggcgagcaccggacctcgcaagaagaagagcaaacgcatctccgagttggacaacgagaaggtgcgcaatatcatgaaagataagaacacgcccttctgcacacccaacgtgcagactcggcggggtcgcgtcaagattgacgaggtgagccgcatgttccgtcacaccaatcgttctcttgagtacaagaatctgccattcatgatccctagtatgcaccaagtgttagaagaggccatcaaagtttgcaagaccatgcaggtgaacaacaagggcattcagatcatctacacccgcaatcatgaagtgaagaatgaggtggatcaggtacggtgtcgcctgggtagcatgtgcaacctggccctctccactcccttcctcatggagcacactatgcctgtgacacaccctcctgatgtggcgcagcgcacggccgatgcttgtaacgacggtgtcaaggccgtgtggaacctcaaagaactgcacacccaccaattgtgcccgcgctcttctgattaccgcaacatgattatccacgctgccacgcccgtggacctgttgggcgctctcaacctgtgcctgcccctgatgcagaagtttcccaaacaggtcatggtgcgcatcttctccaccaaccagggtgggttcatgctgcctatctacgagacggccgcgaaggcctacgccgtggggcagtttgagaagcccaccgagacccctcccgaagacctggacaccctgagcctggccatcgaggcagccatccaggacctgaggaacaaatctcag

SEQ ID NO: 152 - DNA, 2721 bp, Artificial Sequence
  Synthetic nucleotide sequence
atggaatccaggatctggtgcctggtagtctgcgttaacttgtgtatcgtctgtctgggtgctgcggtttcctcatcttctactcgtggaacttctgctactcacagtcaccattcctctcatacgacgtctgctgctcactctcgatccggttcagtctctcaacgcgtaacttcttcccaaacggtcagccatggtgttaacgagaccatctacaacactaccctcaagtacggagatgtggtgggggtcaataccaccaagtacccctatcgcgtgtgttctatggcccagggtacggatcttattcgctttgaacgtaatatcgtctgcacctcgatgaagcccatcaatgaagacctggacgagggcatcatggtggtctacaaacgcaacatcgtcgcgcacacctttaaggtacgagtctaccagaaggttttgacgtttcgtcgtagctacgcttacatccacaccacttatctgctgggcagcaacacggaatacgtggcgcctcctatgtgggagattcatcatatcaacagccacagtcagtgctacagttcctacagccgcgttatagcaggcacggttttcgtggcttatcatagggacagctatgaaaacaaaaccatgcaattaatgcccgacgattattccaacacccacagtacccgttacgtgacggtcaaggatcaatggcacagccgcggcagcacctggctctatcgtgagacctgtaatctgaattgtatggtgaccatcactactgcgcgctccaaatatccttatcattttttcgccacttccacgggtgacgtggttgacatttctcctttctacaacggaaccaatcgcaatgccagctactttggagaaaacgccgacaagtttttcatttttccgaactacactatcgtctccgactttggaagaccgaattctgcgttagagacccacaggttggtggcttttcttgaacgtgcggactcggtgatctcctgggatatacaggacgaaaagaatgtcacttgtcaactcactttctgggaagcctcggaacgcaccattcgttccgaagccgaggactcgtatcacttttcttctgccaaaatgaccgccactttcttatctaagaagcaagaggtgaacatgtccgactctgcgctggactgcgtacgtgatgaggctataaataagttacagcagattttcaatacttcatacaatcaaacatatgaaaaatatggaaacgtgtccgtctttgaaaccactggtggtttggtagtgttctggcaaggtatcaagcaaaaatctctggtggaactcgaacgtttggccaaccgctccagtctgaatcttactcataatagaaccaaaagaagtacagatggcaacaatgcaactcatttatccaacatggaatcggtgcacaatctggtctacgcccagctgcagttcacctatgacacgttgcgcggttacatcaaccgggcgctggcgcaaatcgcagaagcctggtgtgtggatcaacggcgcaccctagaggtcttcaaggaactcagcaagatcaacccgtcagccattctctcggccatttacaacaaaccgattgccgcgcgtttcatgggtgatgtcttgggcctggccagctgcgtgaccatcaaccaaaccagcgtcaaggtgctgcgtgatatgaacgtgaaggagtcgccaggacgctgctactcacgacccgtggtcatctttaatttcgccaacagctcgtacgtgcagtacggtcaactgggcgaggacaacgaaatcctgttgggcaaccaccgcactgaggaatgtcagcttcccagcctcaagatcttcatcgccgggaactcggcctacgagtacgtggactacctcttcaaacgcatgattgacctcagcagtatctccaccgtcgacagcatgatcgccctggatatcgacccgctggaaaataccgacttcagggtactggaactttactcgcagaaagagctgcgttccagcaacgtttttgacctcgaagagatcatgcgcgaattcaactcgtacaagcagcgggtaaagtacgtggaggacaaggtagtcgacccgctaccgccctacctcaagggtctggacgacctcatgagcggcctgggcgccgcgggaaaggccgttggcgtagccattggggccgtgggtggcgcggtggcctccgtggtcgaaggcgttgccaccttcctcaaaaaccccttcggagcgttcaccatcatcctcgtggccatagctgtagtcattatcacttatttgatctatactcgacagcggcgtttgtgcacgcagccgctgcagaacctctttccctatctggtgtccgccgacgggaccaccgtgacgtcgggcagcaccaaagacacgtcgttacaggctccgccttcctacgaggaaagtgtttataattctggtcgcaaaggaccgggaccaccgtcgtctgatgcatccacggcggctccgccttacaccaacgagcaggcttaccagatgcttctggccctggcccgtctggacgcagagcagcgagcgcagcagaacggtacagattctttggacggacggactggcacgcaggacaagggacagaagcccaacctactagaccgactgcgacatcgcaaaaacggctaccgacacttgaaagactctgacgaagaagagaacgtc

SEQ ID NO: 153 - DNA, 2226 bp, Artificial Sequence
  Synthetic nucleotide sequence
atgcggccaggcctcccctcctacctcatcatcctcgccgtctgtctcttcagccacctactttcgtcacgatatggcgcagaagccgtatccgaaccgctggacaaagcgtttcacctactgctcaacacctacgggagacccatccgcttcctgcgtgaaaataccacccagtgtacctacaacagcagcctccgtaacagcacggtcgtcagggaaaacgccatcagtttcaacttcttccaaagctataatcaatactatgtattccatatgcctcgatgtctctttgcgggtcctctggcggagcagtttctgaaccaggtagatctgaccgaaaccctggaaagataccaacagagacttaacacttacgcgctggtatccaaagacctggccagctaccgatctttctcgcagcagctaaaggcacaagacagcctaggtgaacagcccaccactgtgccaccgcccattgacctgtcaatacctcacgtttggatgccaccgcaaaccactccacacggctggacagaatcacataccacctcaggactacaccgaccacactttaaccagacctgtatcctctttgatggacacgatctactattcagcaccgtcacaccttgtttgcaccaaggcttttacctcatcgacgaactacgttacgttaaaataacactgaccgaggacttcttcgtagttacggtgtccatagacgacgacacacccatgctgcttatcttcggccatcttccacgcgtacttttcaaagcgccctatcaacgcgacaactttatactacgacaaactgagaaacacgagctcctggtgctagttaagaaagatcaactgaaccgtcactcttatctcaaagacccggactttcttgacgccgcacttgacttcaactacctagacctcagcgcactactacgtaacagctttcaccgttacgccgtggatgtactcaagagcggtcgatgtcagatgctggaccgccgcacggtagaaatggccttcgcctacgcattagcactgttcgcagcagcccgacaagaagaggccggcgcccaagtctccgtcccacgggccctagaccgccaggccgcactcttacaaatacaagaatttatgatcacctgcctctcacaaacaccaccacgcaccacgttgctgctgtatcccacggccgtggacctggccaaacgagccctttggacaccgaatcagatcaccgacatcaccagcctcgtacgcctggtctacatactctctaaacagaatcagcaacatctcatcccccaatgggcactacgacagatcgccgactttgccctaaaactacacaaaacgcacctggcctcttttctttcagccttcgcacgccaagaactctacctcatgggcagcctcgtccactccatgctggtacatacgacggagagacgcgaaatcttcatcgtagaaacgggcctctgttcattggccgagctatcacactttacgcagttgttagctcatccacaccacgaatacctcagcgacctgtacacaccctgttccagtagcgggcgacgcgatcactcgctcgaacgcctcacgcgtctcttccccgatgccaccgtccccgctaccgttcccgccgccctctccatcctatctaccatgcaaccaagcacgctggaaaccttccccgacctgttttgcttgccgctcggcgaatccttctccgcgctgaccgtctccgaacacgtcagttatatcgtaacaaaccagtacctgatcaaaggtatctcctaccctgtctccaccaccgtcgtaggccagagcctcatcatcacccagacggacagtcaaactaaatgcgaactgacgcgcaacatgcataccacacacagcatcacagtggcgctcaacatttcgctagaaaactgcgccttttgccaaagcgccctgctagaatacgacgacacgcaaggcgtcatcaacatcatgtacatgcacgactcggacgacgtccttttcgccctggatccctacaacgaagtggtggtctcatctccgcgaactcactacctcatgcttttgaagaacggtacggtactagaagtaactgacgtcgtcgtggacgccaccgacagtcgtctcctcatgatgtccgtctacgcgctatcggccatcatcggcatctatctgctctaccgcatgctcaagacatgc

SEQ ID NO: 154 - DNA, 2226 bp, Artificial Sequence; identical to SEQ ID NO: 153
  Synthetic nucleotide sequence

SEQ ID NO: 155 - DNA, 513 bp, Artificial Sequence
  Synthetic nucleotide sequence
atgagtcccaaagatctgacgccgttcttgacggcgttgtggctgctattgggtcacagccgcgtgccgcgggtgcgcgcagaagaatgttgcgaattcataaacgtcaaccacccgccggaacgctgttacgatttcaaaatgtgcaatcgcttcaccgtcgcgctgcggtgtccggacggcgaagtctgctacagtcccgagaaaacggctgagattcgcgggatcgtcaccaccatgacccattcattgacacgccaggtcgtacacaacaaactgacgagctgcaactacaatccgttatacctcgaagctgacgggcgaatacgctgcggcaaagtaaacgacaaggcgcagtacctgctgggcgccgctggcagcgttccctatcgatggatcaatctggaatacgacaagataacccggatcgtgggcctggatcagtacctggagagcgttaagaaacacaaacggctggatgtgtgccgcgctaaaatgggctatatgctgcag

SEQ ID NO: 156 - DNA, 834 bp, Artificial Sequence
  Synthetic nucleotide sequence
atgtgccgccgcccggattgcggcttctctttctcacctggaccggtgatactgctgtggtgttgccttctgctgcccattgtttcctcagccgccgtcagcgtcgctcctaccgccgccgagaaagtccccgcggagtgccccgaactaacgcgccgatgcttgttgggtgaggtgtttgagggtgacaagtatgaaagttggctgcgcccgttggtgaatgttaccgggcgcgatggcccgctatcgcaacttatccgttaccgtcccgttacgccggaggccgccaactccgtgctgttggacgaggctttcctggacactctggccctgctgtacaacaatccggatcaattgcgggccctgctgacgctgttgagctcggacacagcgccgcgctggatgacggtgatgcgcggctacagcgagtgcggcgatggctcgccggccgtgtacacgtgcgtggacgacctgtgccgcggctacgacctcacgcgactgtcatacgggcgcagcatcttcacggaacacgtgttaggcttcgagctggtgccaccgtctctctttaacgtggtggtggccatacgcaacgaagccacgcgtaccaaccgcgccgtgcgtctgcccgtgagcaccgctgccgcgcccgagggcatcacgctcttttacggcctgtacaacgcagtgaaggaattctgcctgcgtcaccagctggacccgccgctgctacgccacctagataaatactacgccggactgccgcccgagctgaagcagacgcgcgtcaacctgccggctcactcgcgctatggccctcaagcagtggatgctcgc

SEQ ID NO: 157 - DNA, 642 bp, Artificial Sequence
  Synthetic nucleotide sequence
atgctgcggcttctgcttcgtcaccactttcactgcctgcttctgtgcgcggtttgggcaacgccctgtctggcgtctccgtggtcgacgctaacagcaaaccagaatccgtccccgccatggtctaaactgacgtattccaaaccgcatgacgcggcgacgttttactgtccttttctctatccctcgcccccacgatcccccttgcaattctcggggttccagcgggtatcaacgggtcccgagtgtcgcaacgagaccctgtatctgctgtacaaccgggaaggccagaccttggtggagagaagctccacctgggtgaaaaaggtgatctggtacctgagcggtcggaaccaaaccatcctccaacggatgccccgaacggcttcgaaaccgagcgacggaaacgtgcagatcagcgtggaagacgccaagatttttggagcgcacatggtgcccaagcagaccaagctgctacgcttcgtcgtcaacgatggcacacgttatcagatgtgtgtgatgaagctggagagctgggctcacgtcttccgggactacagcgtgtcttttcaggtgcgattgacgttcaccgaggccaataaccagacttacaccttctgcacccatcccaatctcatcgtt

SEQ ID NO: 158 - DNA, 1671 bp, Artificial Sequence
  Synthetic nucleotide sequence
atggagtcgcgcggtcgccgttgtcccgaaatgatatccgtactgggtcccatttcggggcacgtgctgaaagccgtgtttagtcgcggcgatacgccggtgctgccgcacgagacgagactcctgcagacgggtatccacgtacgcgtgagccagccctcgctgatcctggtgtcgcagtacacgcccgactcgacgccatgccaccgcggcgacaatcagctgcaggtgcagcacacgtactttacgggcagcgaggtggagaacgtgtcggtcaacgtgcacaaccccacgggccgaagcatctgccccagccaagagcccatgtcgatctatgtgtacgcgctgccgctcaagatgctgaacatccccagcatcaacgtgcaccactacccgtcggcggccgagcgcaaacaccgacacctgcccgtagccgacgctgttattcacgcgtcgggcaagcagatgtggcaggcgcgtctcacggtctcgggactggcctggacgcgtcagcagaaccagtggaaagagcccgacgtctactacacgtcagcgttcgtgtttcccaccaaggacgtggcactgcggcacgtggtgtgcgcgcacgagctggtttgctccatggagaacacgcgcgcaaccaagatgcaggtgataggtgaccagtacgtcaaggtgtacctggagtccttctgcgaggacgtgccctccggcaagctctttatgcacgtcacgctgggctctgacgtggaagaggacctaacgatgacccgcaacccgcaacccttcatgcgcccccacgagcgcaacggctttacggtgttgtgtcccaaaaatatgataatcaaaccgggcaagatctcgcacatcatgctggatgtggcttttacctcacacgagcattttgggctgctgtgtcccaagagcatcccgggcctgagcatctcaggtaacctgttgatgaacgggcagcaaatcttcctggaggtacaagcgatacgcgagaccgtggaactgcgtcagtacgatcccgtggctgcgctcttctttttcgatatcgacttgttgctgcagcgcgggcctcagtacagcgagcaccccaccttcaccagccagtatcgcatccagggcaagcttgagtaccgacacacctgggaccggcacgacgagggtgccgcccagggcgacgacgacgtctggaccagcggatcggactccgacgaagaactcgtaaccaccgagcgtaagacgccccgcgtcaccggcggcggagccatggcgagcgcctccacttccgcgggctcagcatcctcggcgacggcgtgcacggcgggcgttatgacacgcggccgccttaaggccgagtccaccgtcgcgcccgaagaggacaccgacgaggattccgacaacgaaatccacaatccggccgtgttcacctggccgccctggcaggccggcatcctggcccgcaacctggtgcccatggtggctacggttcagggtcagaatctgaagtaccaggagttcttctgggacgccaacgacatctaccgcatcttcgccgaattggaaggcgtatggcagcccgctgcgcaacccaaacgtcgccgccaccggcaagacgccttgcccgggccatgcatcgcctcgacgcccaaaaagcaccgaggt

SEQ ID NO: 159 - DNA, 1683 bp, Artificial Sequence
  Synthetic nucleotide sequence
atggagtcgcgcggtcgccgttgtcccgaaatgatatccgtactgggtcccatttcggggcacgtgctgaaagccgtgtttagtcgcggcgatacgccggtgctgccgcacgagacgcgactcctgcagacgggtatccacgtacgcgtgagccagccctcgctgatcctggtgtcgcagtacacgcccgactcgacgccatgccaccgcggcgacaatcagctgcaggtgcagcacacgtactttacgggcagcgaggtggagaacgtgtcggtcaacgtgcacaaccccacgggccgaagcatctgccccagccaagagcccatgtcgatctatgtgtacgcgctgccgctcaagatgctgaacatccccagcatcaacgtgcaccactacccgtcggcggccgagcgcaaacaccgacacctgcccgtagccgacgctgttattcacgcgtcgggcaagcagatgtggcaggcgcgtctcacggtctcgggactggcctggacgcgtcagcagaaccagtggaaagagcccgacgtctactacacgtcagcgttcgtgtttcccaccaaggacgtggcactgcggcacgtggtgtgcgcgcacgagctggtttgctccatggagaacacgcgcgcaaccaagatgcaggtgataggtgaccagtacgtcaaggtgtacctggagtccttctgcgaggacgtgccctccggcaagctctttatgcacgtcacgctgggctctgacgtggaagaggacctaacgatgacccgcaacccgcaacccttcatgcgcccccacgagcgcaacggctttacggtgttgtgtcccaagaatatgataatcaaaccgggcaagatctcgcacatcatgctggatgtggcttttacctcacacgagcattttgggctgctgtgtcccaagagcatcccgggcctgagcatctcaggtaacctgttgatgaacgggcagcaaatcttcctggaggtacaagcgatacgcgagaccgtggaactgcgtcagtacgatcccgtggctgcgctcttctttttcgatatcgacttgttgctgcagcgcgggcctcagtacagcgagcaccccaccttcaccagccagtatcgcatccagggcaagcttgagtaccgacacacctgggaccggcacgacgagggtgccgcccagggcgacgacgacgtctggaccagcggatcggactccgacgaagaactcgtaaccaccgagcgtaagacgccccgcgtcaccggcggcggcgccatggcgagcgcctccacttccgcgggccgcaaacgcaaatcagcatcctcggcgacggcgtgcacggcgggcgttatgacacgcggccgccttaaggccgagtccaccgtcgcgcccgaagaggacaccgacgaggattccgacaacgaaatccacaatccggccgtgttcacctggccgccctggcaggccggcatcctggcccgcaacctggtgcccatggtggctacggttcagggtcagaatctgaagtaccaggagttcttctgggacgccaacgacatctaccgcatcttcgccgaattggaaggcgtatggcagcccgctgcgcaacccaaacgtcgccgccaccggcaagacgccttgcccgggccatgcatcgcctcgacgcccaagaagcaccgaggt

SEQ ID NO: 160 - DNA, 2721 bp, Artificial Sequence
  Synthetic nucleotide sequence
atggaaagccggatctggtgtcttgtggtgtgcgtgaatctttgcatcgtgtgcttgggtgccgccgtgtcatctagcagcacaagaggcacctccgccactcactcacaccacagcagccacacgaccagcgccgctcactccagaagcggctctgtaagccagagagtgaccagttctcaaaccgtcagccacggcgtcaatgagacgatatataatacaaccctgaagtatggagacgtggtgggtgtcaataccaccaagtacccttatcgcgtgtgcagcatggcccagggcactgacctgatcagattcgagagaaatatcgtctgcacctccatgaagcctatcaacgaggaccttgacgagggcatcatggttgtctacaagagaaacattgtggctcacaccttcaaggtgagagtgtatcagaaagtactgacctttaggagatcctacgcttacatccacaccacgtacctgctcggctccaacaccgagtatgtggctccacccatgtgggagattcatcacatcaattcccacagccaatgttacagttcctatagcagagtcattgctggtaccgtgttcgtcgcttaccacagagacagctatgagaacaagaccatgcagttgatgcccgatgactactccaatacacactctacaaggtatgtgacagtcaaagatcagtggcacagccggggcagcacctggctgtaccgagagacatgtaatctgaattgtatggtgactatcactacagccaggagcaaatatccataccacttcttcgccactagcaccggggacgtcgtggacatttccccattctacaatggcacaaacagaaacgccagctacttcggcgagaatgccgacaagttctttatattccccaactataccatcgtgagcgacttcggccgccccaacagcgccctggaaacccaccggctcgtggcctttctcgagcgggccgatagcgtcatatcctgggacatccaggacgagaagaatgtgacatgccagctgaccttctgggaggcctccgagcgtaccatccggtccgaggcagaggacagctaccatttcagcagcgccaagatgaccgcaaccttcctcagtaagaaacaggaggttaacatgtctgattctgccctggactgcgtgcgcgatgaggcaatcaacaagctgcagcagatcttcaacacatcttacaaccaaacttacgagaagtacggcaacgtcagcgtgttcgagacaacaggaggcctggtagtgttctggcaaggtatcaagcagaagagtctggtggagctcgagcgactggctaaccgcagctccctcaacctgacccataataggacaaagagaagcaccgacggcaacaacgctactcatttgagcaacatggaatccgtgcacaacctggtgtatgcccagctgcagttcacttacgacaccctgagaggctacatcaatagagccttagctcagatcgcagaggcttggtgtgtggaccagcgaagaactctggaggtgttcaaggagttaagtaagatcaatccatccgccatcctgtctgctatctacaacaagcccattgccgccaggttcatgggagatgtgctcggcctggctagttgtgtcaccatcaaccagacctccgtgaaggtgctgcgggacatgaatgtgaaggagagccccggtcggtgttactccagaccagtggtgattttcaacttcgccaacagctcctatgtgcagtacggacagctcggagaggataacgagatcttgctcggcaatcacagaactgaggagtgtcagctgccatcactgaagatatttattgccgggaattccgcctacgaatacgttgactaccttttcaagagaatgatcgacctgagcagcatcagcaccgtcgacagcatgattgctctcgatatcgaccctctggagaacaccgactttagagtccttgagctgtattcacagaaggagctgaggagctccaatgtgttcgacctggaggaaatcatgagagagttcaactcttacaagcagcgggtgaagtacgtggaggataaggtagtggacccactcccaccatacctgaaaggactcgacgatctcatgagcggactgggcgcagccgggaaggctgttggcgtcgccatcggagcggtcggaggagcagtggctagcgtggtggagggcgtggccaccttcctgaagaaccctttcggcgcctttaccatcatcctggtggccatcgccgtggtcatcattacatatctgatttatacaagacagagaaggctctgcacccagcccttgcagaacctgttcccctacctggtcagtgccgacggtacaaccgtgaccagcggtagcaccaaggacacctccctgcaggcaccgccgagctacgaggagtccgtgtataacagtggaagaaagggccccggaccgcccagcagcgacgcatccaccgccgctcctccctacacaaatgagcaggcctatcagatgttgctggctctggcacgcctggacgccgagcagcgagctcagcagaacggcaccgattccctggatggacgcacaggcacacaggacaaggggcagaagcccaacctcctcgacagactgagacaccggaagaacggatacaggcatctgaaggactccgatgaggaggagaacgtt

SEQ ID NO: 161 - DNA, 2721 bp, Artificial Sequence
  Synthetic nucleotide sequence
atggaatccaggatctggtgcctcgtggtctgtgtgaacttgtgcatcgtgtgcttgggtgccgccgtgagcagtagcagcaccagaggcaccagcgcaacacactcacaccacagctcccataccacttccgccgcccactccagatcgggctccgtgagccagagggtcaccagcagccagacggtgtcccacggagtgaatgaaaccatctacaacactactctgaagtacggagacgtcgtcggcgtgaataccactaagtacccctacagggtctgctctatggcccaaggcacagacctgatcagatttgaaagaaatatcgtctgtacctccatgaagcccatcaatgaggacttagacgagggcattatggtggtgtataaacgcaacattgtggcccacactttcaaggtcagagtgtatcagaaagtgctcaccttcaggcgtagctatgcctatatccacaccacttatctcctcggcagcaacaccgagtatgttgccccgcctatgtgggagattcaccatataaatagccatagccagtgctacagctcctattcgagagtaatcgccggaaccgttttcgtcgcctaccacagagactcgtacgagaacaagacaatgcagctgatgccagatgactattcgaacacccacagcacgagatatgtcaccgtgaaagatcagtggcacagcaggggtagtacatggttgtatagggaaacctgcaatctcaattgcatggtgaccatcaccaccgccagaagcaaatacccctatcatttcttcgctacctcgacaggagacgtggtggacatatctcccttttataatggcacaaatagaaatgctagctactttggagagaacgccgacaaattcttcatcttccctaactataccatcgtgagcgactttgggcgacctaacagcgccctcgagactcacaggctggtggctttcttagagagggctgatagtgttatctcttgggacattcaggatgagaagaacgtgacatgccagctgacattttgggaggctagcgagcgaaccatcaggtccgaggccgaggacagctaccatttctctagtgccaagatgaccgccaccttcttgtcaaagaagcaagaggtgaacatgtccgactctgcgctggactgtgtccgcgacgaggcaattaataaactgcagcagatctttaataccagctacaaccagacatacgagaagtatggcaacgtgagcgtcttcgaaaccacaggcggccttgtcgtcttttggcaaggcatcaagcagaagagtctggtggagctggaaagactcgccaaccggtcatccctgaatctgacccacaataggacaaagcgcagcaccgatgggaacaacgccacccacctgtcgaacatggagtcagtgcacaacctggtgtacgcccagctgcagttcacttatgataccctcagaggctacattaaccgcgcactggctcagatcgccgaagcatggtgcgtggaccagcggcgaaccctggaagtgtttaaagagctctccaagattaatcctagcgccatcctgagtgctatctacaataagcctatcgccgcaagatttatgggcgacgtgctgggactggcttcctgcgtgacaattaaccagacctccgtcaaggtgctgagggacatgaacgtgaaggagagccccggcagatgctatagccggccagtggtgatcttcaatttcgccaacagctcatacgtgcagtacggccagctcggggaggataatgaaatcctgctgggaaatcacagaaccgaggagtgtcagctgcccagtctgaagattttcatcgcaggcaacagtgcctatgaatacgtggactatctgttcaaacgcatgatcgatctgagctctatctccaccgtggactccatgattgccttggatatcgacccactggagaacaccgatttcagagtgctggagctgtacagccagaaggagctcaggtccagcaatgtgttcgacctggaggaaatcatgagagagttcaactcctacaaacagagagtcaagtacgtggaggacaaggtggtggatcccctgcctccctacctgaaggggctggacgacctgatgagtggcctgggagccgccggcaaagctgtgggagtggccatcggtgccgtcggaggggctgtggccagcgtcgtcgagggagttgccacattcctgaagaaccccttcggggccttcaccattatcctagtcgccattgccgtggtcatcattacctatctgatctacacgcggcagagacggctgtgcacccagcctttgcagaacctgttcccctatttagtgtccgctgacgggaccactgtgacaagcggaagcaccaaggacacatccctgcaggccccacccagctacgaggagtctgtttacaattctggccggaagggccccggccctccctcttctgacgcctccaccgcagcccctccttacacaaacgagcaggcttaccagatgctgttggctttggcccgtctggacgccgaacagagggcccagcagaatggcaccgactccttggacggccggacagggacccaggataagggtcagaagcctaacctactggatcggctccgccatcgcaagaatggctacagacatctcaaggacagcgacgaagaagagaatgtg

SEQ ID NO: 162 - DNA, 2721 bp, Artificial Sequence
  Synthetic nucleotide sequence
atggaatcaagaatctggtgtctcgtggtgtgcgtgaacctgtgtatcgtctgtcttggcgccgccgtctcttcctcaagcacccggggtaccagtgccacccactcacatcactcctcccacactaccagcgccgcccacagcagatccggctccgtgtcccagcgggtgaccagcagccagaccgtgtcacacggcgttaatgaaaccatttacaacaccacactgaagtacggggacgtggtgggcgtgaacaccaccaagtatccctacagggtgtgcagcatggcccagggcaccgacctgattcggttcgagagaaacatcgtgtgcacatccatgaagcctatcaatgaggacctcgacgagggcatcatggtggtttacaagaggaacattgtcgcacacacatttaaggtgcgagtgtaccagaaggtgttaaccttcagaaggtcctacgcatacatccacaccacctacctcctgggctctaacacagaatacgtcgcccctcccatgtgggagattcaccacatcaacagtcacagccagtgctacagctcgtatagcagagttatcgctggcaccgtgttcgtggcttatcaccgcgacagctacgagaacaagacgatgcaacttatgcccgacgattactcaaacacgcactccactagatacgtgactgtgaaggaccagtggcacagtagaggcagcacctggctgtaccgggaaacatgcaatctcaattgtatggtcaccattaccaccgccaggtccaagtacccttaccacttcttcgccacctccactggcgacgtggtcgacatcagccccttctacaatggcaccaacaggaacgcctcttactttggggagaacgccgataaattctttattttccccaactacactattgtctccgactttggcagacccaactcagcattggaaacccacaggctcgtggccttcctggagcgggccgatagtgtgatcagctgggacatccaggatgagaagaacgtgacatgccagctgaccttctgggaggccagcgaacgaaccatccggtccgaggccgaggactcttatcacttctctagcgcaaagatgaccgccaccttcctgtctaagaaacaggaggtgaacatgagcgacagcgccctggactgcgtcagagacgaggcaatcaacaagctgcagcaaatcttcaacaccagctacaaccaaacctacgagaaatacggcaacgtcagcgtcttcgagactaccggagggctcgttgttttctggcagggcattaagcagaagtctctggtcgagctggaaaggctggccaatagaagctccctaaacctcactcacaacagaactaagagaagcaccgatggcaataacgccactcatctgagtaacatggagtctgttcacaacctggtgtatgcccagctgcagtttacttatgacacactgaggggctacatcaatcgagccctggcccagatcgccgaggcttggtgcgtcgaccagagaagaacactggaagtgttcaaggagctgagtaagattaatcccagcgccattctgtccgccatctacaataagccaatcgccgcaagattcatgggtgacgtgctgggcctggcctcctgcgtgacaatcaaccagacaagcgtgaaagtcctcagagacatgaacgtcaaggagtctcctggcaggtgttactcccggcccgtggtgatatttaatttcgccaacagcagttacgtgcagtacggacagctgggcgaggataacgagatactgctcggaaaccatagaacagaggagtgccaactgccctccctgaagattttcatcgccgggaacagcgcctatgagtatgttgactatctgttcaagcggatgatcgacctgagttctatcagcaccgttgactccatgattgctctcgatatcgatcctctggagaacaccgatttcagagtgctggaactctactctcagaaagagctaagaagctcgaacgtgttcgacctggaagaaatcatgagagagttcaactcctacaaacagagggttaagtacgtagaggataaggtcgtggaccctctgcctccataccttaagggattagatgatctgatgagcggcctgggcgctgccggaaaggccgtgggagtggccatcggcgcagtgggtggtgccgtggctagcgtcgtggaaggcgttgccacattcttgaagaacccattcggggccttcacaatcatcctggtggctatcgccgttgtgattatcacatatctgatctacactcgccagcggaggctctgcacccagcctctgcagaaccttttcccctacctagtgtccgctgatgggactacagtcactagcggcagcactaaggacacatccctgcaggctcctccatcttacgaggagagcgtgtataactccgggcgcaagggacctggccctcccagcagcgacgccagcacggcggctcctccctacaccaacgagcaggcataccagatgttgcttgcactggcccgtctggacgctgagcagagggcccagcagaatgggactgattccctggacggcagaaccggcacacaggataaaggacagaaaccgaatctgctcgacaggctgaggcaccggaagaatggatacaggcatctgaaggacagtgacgaggaggagaacgtg

SEQ ID NO: 163 - DNA, 2721 bp, Artificial Sequence
  Synthetic nucleotide sequence
atggagtcaagaatctggtgcttggtggtgtgtgtgaacttgtgtatcgtgtgccttggagccgccgtgagcagcagctccaccagaggcaccagcgccacccacagccatcactcttcccacaccacaagcgccgcccactcgcggagcgggagtgtttcccaacgggtgacaagcagccagactgtgagccacggcgttaacgagacaatctacaacacaacactgaagtacggcgacgtggtgggtgtaaatactaccaagtatccttacagggtgtgctctatggcccagggtaccgacctgatcaggtttgagagaaacattgtttgcacaagcatgaagcccatcaatgaggacttggatgagggcatcatggtggtttacaagagaaatatcgtggcccacaccttcaaagtgagggtgtatcagaaggtgctgacctttagaaggagctacgcttatatccacacaacctaccttctgggcagcaacaccgagtacgtcgcaccacccatgtgggaaattcaccacatcaactctcactcccagtgctattccagctacagcagagtgatagccggcacagtcttcgtggcctaccacagggatagttacgagaataagacgatgcaactgatgcctgacgattactccaacacacacagcacccggtacgtcaccgtgaaggaccagtggcactccagaggtagtacttggctgtaccgggagacttgtaacctgaactgcatggtgacaattaccactgctcgaagcaagtacccttaccacttctttgccacctctaccggcgatgtcgtagacatatctcctttctataacgggaccaacagaaacgcttcgtacttcggcgagaacgctgacaagttcttcatcttcccgaactacactatagttagcgactttggtaggccgaacagcgccctggagacacaccgacttgtggccttcctcgagagagctgacagcgtgatctcctgggacatccaggacgagaagaacgtcacctgccagctgacattctgggaggcctctgagaggaccatcagatccgaggccgaggattcataccactttagcagcgctaagatgaccgctaccttcctgagtaagaagcaggaagtgaacatgtccgactcagccctcgactgcgtgagggacgaggccatcaacaagctgcagcagatcttcaacacctcctacaaccagacatatgagaagtatggtaacgtgagcgtgttcgagacaaccggcggactggtcgtgttttggcagggcataaagcagaagtctctggtcgagctggagaggctggcgaacaggagcagcctcaacctgacccataacagaaccaaacgcagcaccgacggcaacaatgctacccacctgtcaaacatggagagcgtccacaacctggtgtatgcccagctgcaatttacatacgacacgctgcgcggctacatcaatagagccctggcccagatcgccgaggcttggtgcgttgaccagcggcgtactctggaagtcttcaaggagctgagcaagatcaatcccagcgctatcctgagcgcgatctacaataaacctattgctgccagattcatgggagacgtgttggggctggccagctgcgtgacaatcaatcagaccagcgtgaaagtgctgagagacatgaatgtgaaggagtctcctggtaggtgctactcaaggcccgtcgtaattttcaatttcgccaacagttcctacgtgcagtacggacagctgggcgaagacaatgagatcctcctgggcaaccatcggacggaggagtgtcaactcccatcactgaagatctttatcgcaggcaattccgcctatgagtatgtggactatctgttcaagaggatgatcgacctgtccagcatcagcacagtggattcaatgattgcccttgacatcgaccctcttgagaataccgactttagagtgctggagctttatagccagaaagagctcaggagctccaatgtgttcgacctggaagagatcatgcgggagtttaacagctacaagcagagggttaaatatgtggaggacaaggttgtggatccactgccgccctacctgaaagggctggacgacctcatgtccggcctaggagccgcagggaaagccgtgggcgtggccatcggcgcagttggaggcgccgtcgcctctgtggttgaaggcgttgcgacctttctgaagaacccattcggcgccttcaccattatcctggtggccattgccgtggtcatcatcacctatctgatctacaccaggcaacgacgcctgtgcacccagcccctgcagaacctgttcccttacctggtcagcgccgatgggaccacagtgacctctggttctactaaagacaccagccttcaggcccctccatcctacgaggagtctgtgtacaatagcggcagaaagggccccggcccgcccagcagcgatgccagcaccgccgctcctccatacacgaacgagcaggcctatcagatgctgctggcccttgcccgcctggacgccgagcagcgtgctcagcagaatggcaccgattctctggacggccgaactggaacgcaagacaagggacagaagccaaacctgctggacagactgagacacaggaagaatggctacaggcatctgaaggattcagacgaggaggagaacgtg

SEQ ID NO: 164 - DNA, 2721 bp, Artificial Sequence
  Synthetic nucleotide sequence
atggagagccggatctggtgccttgtggtgtgcgtgaacctttgcatcgtgtgcctcggcgccgccgtgagctcatcgagcacccggggcaccagcgccacccacagccaccacagcagccacaccaccagcgcggcccacagtcggagcggcagcgtgagccagcgggtgacctcctcccagaccgtctcccacggcgtgaacgaaaccatctacaacaccaccctgaagtacggcgacgtggttggggtaaataccactaagtacccctaccgggtgtgcagcatggcccagggcaccgacctgatccggttcgagcggaacatcgtctgtaccagcatgaagcccatcaacgaggacctggacgagggcatcatggttgtctacaagcggaatatcgtagcccacaccttcaaggtgcgggtgtaccagaaggtgctgaccttccggcggagctacgcctacattcacacgacttacctgctgggcagcaacaccgagtacgtggcgccgcccatgtgggagatccaccacatcaactctcactctcagtgctacagcagctacagccgggtgatcgccggcaccgtgttcgtggcctaccaccgggacagctacgagaacaagaccatgcagctgatgcccgacgactattctaacacacactccactaggtacgtgaccgtgaaggaccagtggcactccagaggcagcacctggctgtaccgggagacgtgcaacctgaactgcatggtgaccatcaccaccgcccggtcaaagtacccttaccacttcttcgccaccagcactggggatgtggttgacatcagccccttctacaacggcaccaaccggaacgccagctacttcggcgagaacgccgacaagttcttcatcttccccaactacaccatcgtgagcgacttcggccggcccaacagcgccctggaaacacaccggctggtggccttcctggagcgggccgacagcgtgatcagctgggacatccaggacgagaagaacgtgacctgccaactcacattttgggaggccagcgagcggaccatccggagcgaggccgaggactcctatcacttcagcagcgccaagatgaccgccaccttcctgagcaagaagcaggaggtgaacatgagcgattcggcattggactgcgtgcgggacgaggccatcaacaagctgcagcagatcttcaacaccagctacaaccagacctatgagaaatacggcaacgtgagcgtgttcgaaaccaccggcggactggttgttttctggcagggtatcaagcagaagagtttggtggagctcgagcgcctggcaaacaggagcagcctgaacctgacccacaaccggaccaagcggagcaccgacggcaacaatgcaacgcacctatccaacatggagtccgtgcacaacctggtgtacgcccagctgcagttcacctacgacaccctgcggggctacatcaaccgggccctggcccagatcgccgaggcatggtgcgtggaccagcggcggaccctggaggtgttcaaggagctttccaagatcaacccctctgccatcctgtctgctatctacaataagccaatcgcggcacgcttcatgggagacgtactgggcctggccagctgcgtgactattaatcagactagcgtcaaagtgctacgggacatgaacgtaaaggagagccccggccggtgctattctcggcccgtggtcattttcaacttcgccaacagttcctacgtgcagtacggacagttaggcgaggacaacgagattctgctgggtaaccaccggaccgaggagtgccaacttcccagtctaaagatatttatcgccgggaattccgcttatgagtatgtcgactacctgttcaagcggatgatcgacctgtccagtatcagcaccgtggacagcatgattgcactggatatcgaccctctcgagaacaccgacttccgggtgctggagctgtacagccagaaagagctgagatcaagtaatgtctttgacctggaggagatcatgcgggagttcaatagctacaagcagagggtgaaatatgtcgaagacaaggtagtagacccgctgcctccctacctgaaggggcttgacgacctcatgtcagggttaggggcagctggcaaggccgttggcgtcgccatcggcgcggtgggcggtgccgttgcctccgtggtcgaaggcgtcgctaccttcctcaagaaccccttcggcgccttcaccatcatcctggtggctattgcagttgtcatcattacctacctcatctacacccggcagcggaggctgtgcacccagcccctgcagaacctgtttccatacctggtgagcgcagacggaactaccgtgacgagcggatccactaaggacaccagcctgcaggcgcctccttcatacgaagagagtgtgtacaacagcggccggaagggccccggacctccgagtagcgacgcaagtaccgccgccccaccctataccaacgagcaagcttaccagatgctgctggcacttgctcggctggacgccgaacaacgcgcccagcagaacggaactgattctctggacggccggaccggcacccaggacaagggccagaagcccaacctgttggaccggctgcggcaccggaagaacggctatcgtcacctgaaagacagcgacgaggaggagaacgtg

SEQ ID NO: 165 - DNA, 2721 bp, Artificial Sequence
  Synthetic nucleotide sequence
atggagagccggatctggtgcctagtggtgtgcgtgaacctctgcatcgtgtgcctaggcgccgccgtgagcagttctagtacccggggcaccagcgccacccacagccaccacagcagccacactacgtcagcagcgcatagtcggagcggcagcgtgagccagcgggtgacgtcttcccagacagtgtcccacggcgtgaacgaaaccatctacaacaccaccctgaagtacggcgacgtggtgggtgtcaatacaactaagtacccctaccgggtgtgcagcatggcccagggcaccgacctgatccggttcgagcggaatattgtgtgtaccagcatgaagcccatcaacgaggacctggacgagggcatcatggtggtatacaagagaaacattgtcgcccacaccttcaaggtgcgggtgtatcagaaggtgctgaccttccggcggagctacgcctacattcatacgacttacctgctgggcagcaacaccgagtacgtggccccgcccatgtgggagatccaccacatcaacagccactcccagtgctacagcagctacagccgggtgatcgccggcaccgtgttcgtggcctaccaccgggacagctacgagaacaagaccatgcagctgatgcccgacgactatagcaatactcacagcacacggtacgtgaccgtgaaggaccagtggcacagccgcggcagcacctggctgtaccgggaaacgtgcaacctgaactgcatggtgaccatcaccaccgcccggtcgaagtatccctatcacttcttcgccaccagcacgggcgatgtggttgacatcagccccttctacaacggcaccaaccggaacgccagctacttcggcgagaacgccgacaagttcttcatcttccccaactacaccatcgtgagcgacttcggccggcccaacagcgccctggaaacccaccggctggtggccttcctggagcgggccgacagcgtgatcagctgggacatccaggacgagaagaacgtgacctgccagcttacattctgggaggccagcgagcggaccatccggagcgaggccgaggacagttaccacttctcgagcgccaagatgaccgccaccttcctgagcaagaagcaggaggtgaacatgagcgacagtgctctggactgcgtgcgggacgaggccatcaacaagctgcagcagatcttcaacaccagctacaaccagacctatgagaaatacgggaacgtgagcgtgttcgagacaaccggcggcttagtagtgttctggcaggggatcaagcagaagagtttggtggagctcgagcggctggcgaacagaagcagcctgaacctgacccacaaccggaccaagcggagcaccgacggcaacaacgcaacgcacttatcaaacatggaaagtgtgcacaacctggtgtacgcccagctgcagttcacctacgacaccctgcggggctacatcaaccgggccctggcccagatcgccgaggcgtggtgcgtggaccagcggcggaccctggaggtgttcaaggagttgtcgaagatcaacccttctgccatcctgtcagcaatttacaataaacctattgccgcaaggttcatgggagatgtcctgggcctggccagctgcgtgaccataaaccagacaagcgtcaaagtcctccgggacatgaatgtgaaagagagccccggccggtgttacagtcgacccgtggtgatctttaacttcgccaattcttcttatgtgcagtacggacagctcggcgaggacaacgagatcctgctcggtaaccaccggaccgaggagtgtcagcttccctcactgaagattttcattgcggggaacagtgcatacgagtatgttgactacctgttcaagcggatgatcgatctgtctagtatcagcaccgtggacagcatgatcgctctggatatcgacccattggagaacaccgacttccgggtgctggagctgtacagccagaaggagcttcgcagcagtaatgtgtttgacctggaggagatcatgcgggagttcaattcttacaagcagcgcgtgaaatacgttgaggacaaggtggtcgatccgctgcctccctacctgaagggcctggatgatctcatgagcgggttaggggctgccggcaaggccgtcggcgttgccatcggcgcagtgggcggagccgtcgccagcgtggtggagggtgttgcaacgttcctgaagaaccccttcggcgccttcaccatcatcttggttgcaatcgcggttgttatcattacctaccttatctacacccggcaacggcggctgtgcacccagcccctgcagaacctgtttccatacttggtgagcgcggatgggaccaccgtgacttcaggttccaccaaggacaccagcctgcaggcgcctccctcatacgaggagtccgtatacaacagcggccggaaggggccaggtcctcctagctcggacgcaagtactgccgcaccgccttataccaacgagcaggcatatcagatgctgcttgccctggctcggctggacgccgaacagcgcgcccagcagaacggaacagattccctggacggccggaccggcacccaggataagggccagaagcccaacttgctggaccggctgcggcaccggaagaacggctataggcatctgaaggacagcgacgaggaggagaacgtg

SEQ ID NO: 166 - DNA, 2721 bp, Artificial Sequence
  Synthetic nucleotide sequence
atggagagccggatctggtgcctagtggtgtgcgtgaacctatgcatcgtgtgcttaggcgccgccgtgagctcatcgtccacccggggcaccagcgccacccacagccaccacagcagccacacgacaagcgccgcccactcccggagcggcagcgtgagccagcgggtgacttcttcccagacagtgagccacggcgtgaacgagactatctacaacaccaccctgaagtacggcgacgtggtgggcgtcaacactaccaagtacccctaccgggtgtgcagcatggcccagggcaccgacctgatccggttcgagcggaacattgtgtgcaccagcatgaagcccatcaacgaggacctggacgagggcatcatggttgtgtacaagcgtaatatcgtcgcccacaccttcaaggtgcgggtgtaccagaaggtgctgaccttccggcggagctacgcctacatccatactacgtacctgctgggcagcaacaccgagtacgtggctcctcccatgtgggagatccaccacatcaactcccatagccagtgctacagcagctacagccgggtgatcgccggcaccgtgttcgtggcctaccaccgggacagctacgagaacaagaccatgcagctgatgcccgacgactattcgaacacccactcaaccagatacgtgaccgtgaaggaccagtggcattcacggggcagcacctggctgtaccgggaaacatgcaacctgaactgcatggtgaccatcaccaccgcccggagtaaatacccttatcacttcttcgccaccagcacgggcgacgtcgtagacatcagccccttctacaacggcaccaaccggaacgccagctacttcggcgagaacgccgacaagttcttcatcttccccaactacaccatcgtgagcgacttcggccggcccaacagcgccctggagacacaccggctggtggccttcctggagcgggccgacagcgtgatcagctgggacatccaggacgagaagaacgtgacctgccagctgacgttttgggaggccagcgagcggaccatccggagcgaggccgaagattcctatcactttagcagcgccaagatgaccgccaccttcctgagcaagaagcaggaggtgaacatgtctgattccgcgctggactgcgtgcgggacgaggccatcaacaagctgcagcagatcttcaacaccagctacaaccagacctatgagaagtatgggaacgtgagcgtgttcgagacaaccggcgggctggtcgtcttctggcaaggcattaagcagaagtccctcgtggagctggaacggctggccaaccgtagcagcctgaacctgacccacaaccggaccaagcggagcaccgacggcaacaatgctactcatctatcaaacatggaaagcgtgcacaacctggtgtacgcccagctgcagttcacctacgacaccctgcggggctacatcaaccgggccctggcccagatcgccgaggcctggtgcgtggaccagcggcggaccctggaggtgttcaaggagctaagtaagatcaacccctccgcaatcctgagcgccatctataacaagcctatcgccgcccggttcatgggcgatgtgctgggcctggccagctgcgtcaccatcaatcaaactagcgtgaaggtcctacgggacatgaacgtgaaagagagccccggccggtgctactcccggcccgtggtcatcttcaatttcgccaactcttcctatgtgcagtacgggcagctgggcgaggacaacgagattctgctgggtaaccaccggaccgaggagtgccagcttccctccctcaagattttcatagcaggcaattctgcctatgaatacgttgactacctgttcaagcggatgatcgatctctctagtatcagcaccgtggacagcatgattgcgttggacatcgacccgttagagaacaccgacttccgggtgctggagctgtacagccagaaagaactgcgttcaagcaacgttttcgacctggaggagatcatgcgggagttcaactcttacaagcagcgggtcaagtacgtcgaggataaggtcgtggacccgctgccgccctacctgaagggactggacgatctgatgtccggattgggagctgcaggaaaggccgtgggagtagccatcggcgctgttggaggggcagtggccagcgtggtcgaaggcgtcgcgacgttcctgaagaaccccttcggcgccttcacaataatcttggttgccattgctgtcgtcattattacatatcttatctacacccggcagagaagactgtgcacccagcccctgcagaacctgttcccttatttggtgagcgccgacgggacaaccgtcacctccggctcaacgaaggacaccagcctgcaggctccgccttcatatgaagagtcagtatataacagcggccggaaggggccaggtcctccatctagcgacgcatcaactgccgcacctccgtacaccaacgagcaggcataccagatgctgttggccctcgcacggctggacgccgagcaacgcgcccagcagaacgggacggactctttggatggccggaccggcacccaagacaagggccagaagcccaatttgctggaccggctgcggcaccggaagaacggctatagacatctgaaggacagcgacgaggaggagaacgtg

SEQ ID NO: 167 - DNA, 2721 bp, Artificial Sequence
  Synthetic nucleotide sequence
atggagagccggatctggtgcctagtggtgtgcgtgaacctatgcatcgtgtgccttggcgccgccgtgagctcgtccagtacccggggcacctccgccacccactcccaccactcctcccacactacaagcgccgcccactcgcgctccggctccgtctcccagcgcgtcaccagttcccagaccgtgagtcacggcgtcaacgaaaccatctacaacaccaccctcaagtacggcgacgtcgtgggcgtgaatacaaccaagtacccctaccgcgtctgctccatggcccagggcaccgacctcatccgcttcgagcgcaacatcgtctgcacctccatgaagcccatcaacgaggacctcgacgagggcatcatggtcgtgtataagcgaaatattgtggcccacaccttcaaggtccgcgtctaccagaaggtcctcaccttccgccgctcctacgcctacattcacacaacctacctcctcggctccaacaccgagtacgtcgcccctcccatgtgggagatccaccacatcaacagtcacagccagtgctactcctcctactcccgcgtcatcgccggcaccgtcttcgtcgcctaccaccgcgactcctacgagaacaagaccatgcagctcatgcccgacgactatagcaatacacatagtacccgctacgtcaccgtcaaggaccagtggcacagcaggggctccacctggctctaccgcgagacttgcaacctcaactgcatggtcaccatcaccaccgcccgctcaaagtacccgtatcacttcttcgccacctccacgggagacgtggtggacatctcccctttctacaacggcaccaaccgcaacgctagctatttcggcgagaacgccgacaagttcttcatcttccccaactacaccatcgtctccgacttcggccgccccaactccgccctcgaaacccacaggcttgtggccttcctcgagcgcgccgactccgtcatctcctgggacatccaggacgagaagaacgtcacctgccagctcacattctgggaggcctccgagcgcaccatccgctccgaggccgaggattcgtaccactttagctcagcaaagatgaccgccaccttcctctccaagaagcaggaggtcaacatgagcgactctgctttggactgcgtccgcgacgaggccatcaacaagctccagcagatcttcaacacctcctacaaccagacttatgagaagtatggcaacgtctcggtgttcgagactacgggcggtctggtggtcttctggcaggggattaagcagaagtccctcgtcgagttggagagactcgccaaccgctcctccctcaacctcacccacaaccgcaccaagcgctccaccgacggcaacaacgccacgcacctctcaaacatggagtccgtccacaacctcgtctacgcccagctccagttcacctacgacaccctccgcggctacatcaaccgcgccctcgcccagatcgccgaggcctggtgcgtcgaccagcgccgcaccctcgaggtcttcaaggagctcagtaagatcaacccaagtgcgatcctgtcggccatttacaataaaccgattgcagcccgcttcatgggtgacgtactcggcctcgcctcctgcgtgacgattaatcagaccagcgtcaaggtgcttcgcgacatgaatgtgaaggagagcccaggccgctgttacagtcggcccgtcgtcattttcaatttcgccaatagcagctatgtccagtacggccagctcggcgaggacaacgagatactccttggcaaccaccgcaccgaggagtgccagctgccgtctctgaagatattcatagccggcaacagcgcttatgaatacgtggactacctcttcaagcgcatgatcgacctctcctccatctccaccgtcgactccatgatcgcacttgatatcgacccactggagaacaccgacttccgcgttctggaactctactcccagaaggagctacggtcctccaatgttttcgacctcgaggagatcatgcgcgagttcaattcatacaagcaacgggtgaagtatgtggaggacaaggtcgtcgatcctctgcctccctacctcaagggtcttgatgatctcatgtccggcctcggcgctgccgggaaggcagtgggagtcgccatcggcgccgttggaggggccgtcgcctctgtggtggagggcgtggctaccttcctgaagaaccccttcggcgccttcaccattattctggtggccatcgcagtggttatcatcacgtaccttatctacacccggcagagaaggctctgcacccagcccctccagaacctctttccttatctcgtcagcgcagacggtacaacagttactagtggaagtaccaaggacacctccctccaggccccgccaagctacgaggaaagtgtttacaactccggccgcaagggccccggcccaccttcttccgacgcttccaccgctgctccaccatacaccaacgagcaggcctaccagatgctcctggcactggctcggctggatgccgagcagagggcccagcagaacggtaccgattccctcgacggccgcaccggcacccaggataagggccagaagcccaatttactagacagactgcgccaccggaagaacggctaccgccatctgaaggactccgacgaggaggagaacgtc

SEQ ID NO: 168 - DNA, 2721 bp, Artificial Sequence
  Synthetic nucleotide sequence
atggagagccggatctggtgcctagtggtgtgcgtgaacctctgcatcgtgtgcttgggcgccgccgtgagtagttccagtacccggggcacctccgccacccactcccaccactcctcccacactacgagtgccgcccactcacgctccggctccgtctcccagcgcgtcactagttctcagacagtgtctcacggcgtcaacgagacaatctacaacaccaccctcaagtacggcgacgtcgtgggtgtgaatactactaagtacccctaccgcgtctgctccatggcccagggcaccgacctcatccgcttcgagcgcaacatcgtctgcacctccatgaagcccatcaacgaggacctcgacgagggcatcatggtcgtctacaagagaaatatagtggcccacaccttcaaggtccgcgtctaccagaaggtcctcaccttccgccgctcctacgcctacattcacactacctacctcctcggctccaacaccgagtacgtcgccccacccatgtgggagatccaccacatcaactctcacagtcagtgctactcctcctactcccgcgtcatcgccggcaccgtcttcgtcgcctaccaccgcgactcctacgagaacaagaccatgcagctcatgcccgacgactactcaaacactcacagcacccgctacgtcaccgtcaaggaccagtggcacagccgcggctccacctggctctaccgcgagacttgcaacctcaactgcatggtcaccatcaccaccgcccgctcgaagtatccgtaccacttcttcgccacctccacgggcgatgtggtcgacatcagtccattctacaacggcaccaaccgcaacgcttcatacttcggcgagaacgccgacaagttcttcatcttccccaactacaccatcgtctccgacttcggccgccccaactccgccctcgagacacaccgcctggtcgccttcctcgagcgcgccgactccgtcatctcctgggacatccaggacgagaagaacgtcacctgccagttgaccttctgggaggcctccgagcgcaccatccgctccgaggccgaggacagttaccatttcagtagtgccaagatgaccgccaccttcctctccaagaagcaggaggtcaacatgtcggactctgctcttgactgcgtccgcgacgaggccatcaacaagctccagcagatcttcaacacctcctacaaccagacttatgagaagtatggtaacgtctctgtgtttgagactacaggcggtcttgtcgtcttctggcagggtatcaagcagaagtccctcgtcgagctggaacgcctcgccaaccgctcctccctcaacctcacccacaaccgcaccaagcgctccaccgacggcaacaacgcaacacatcttagcaacatggagtccgtccacaacctcgtctacgcccagctccagttcacctacgacaccctccgcggctacatcaaccgcgccctcgcccagatcgccgaggcctggtgcgtcgaccagcgccgcaccctcgaggtcttcaaggagctgagtaagatcaacccaagtgcaatcctaagcgctatttacaacaaacctatcgcagccaggttcatgggagacgtcctcggcctcgcctcctgcgtcaccattaatcagacgtctgttaaggttctccgcgacatgaacgtgaaagagtctccgggccgctgctacagcaggcccgtcgtcatcttcaatttcgccaattcttcatatgtccagtacggccagctcggcgaggacaacgagattctcttagggaaccaccgcaccgaggagtgtcagctacccagcctgaagatctttattgccggcaatagcgcttatgagtatgttgactacctcttcaagcgcatgatcgacctctcctccatctccaccgtcgactccatgatcgctctggatatcgaccctctggagaacaccgacttccgcgtgcttgagctctactcccagaaagagcttaggtcaagcaacgttttcgacctcgaggagatcatgcgcgagttcaactcatataagcaacgcgttaaatatgtagaggataaggtggttgatccacttcctccctacctcaagggtctggatgacctcatgtccggcctcggggcagcaggcaaggccgtcggcgttgccatcggcgccgtgggaggtgctgtggccagtgttgtcgagggcgtagccaccttcttaaagaaccccttcggcgcctttacaataatcctggtggccatcgctgtggttatcattacctatcttatctacaccaggcagcggaggctctgcacccagcccctccagaacctcttcccttacctcgtgagcgcggacgggacgaccgtcacatctggcagtacaaaggacacctccctccaggccccgcctagttatgaagagagcgtttacaactccggccgcaagggccccggtcctccctcctccgacgccagcaccgcagcgcctccatacaccaacgagcaggcctaccagatgctcttggccctggcccgactggatgccgagcagcgcgcccagcagaacggaaccgactccctcgacggccgcaccggcacccaggacaaaggccagaagcccaatctgctcgaccgcctgcgacaccgcaagaacggctatcggcaccttaaagactccgacgaggaggagaacgtc

SEQ ID NO: 169 - DNA, 2226 bp, Artificial Sequence
  Synthetic nucleotide sequence
atgcggccaggacttcctagctacctaatcatccttgccgtgtgtcttttctcacacctcctctctagtaggtacggcgcagaggccgtgtccgagccactcgacaaggccttccaccttttgttaaacacctacggtcggccaatcagattcctccgcgagaacaccacccagtgcacgtacaattcgtctctccgcaacagcacagtcgtgagggagaacgctatatcattcaacttcttccagtcttacaaccagtattacgtgttccacatgccaagatgcctgttcgctggcccactggccgagcagttccttaaccaggtggatctgacagagactctggagagataccaacagaggctgaacacctacgcactggtgagcaaggatctggcctcctacaggagcttcagccaacagctgaaggcccaggacagtctgggcgagcaaccaaccaccgtacctccacctattgacttatcaatacctcacgtgtggatgcctcctcagaccactcctcacggctggaccgaatcccacaccacctccggcctgcacaggcctcatttcaaccagacctgtattctcttcgacggacacgacctgcttttcagcaccgtcacgccatgcttgcaccagggcttctacctgatcgacgagctcaggtatgtgaagatcactctgaccgaggacttcttcgtggttactgtgagcatcgatgacgataccccaatgttactgatcttcggccacctgcctagggtgctgttcaaggcaccataccagagagacaatttcatcctgagacaaaccgagaagcacgagctgctggtgctggtcaagaaggaccagctgaataggcactcatacctgaaggacccagatttcctggacgctgcccttgatttcaattacctggacctgtccgccctgctgagaaacagcttccacagatacgccgtggatgtgctgaagtcaggcagatgtcagatgttggaccgccgaaccgttgagatggccttcgcctacgcgctggccctgttcgccgccgctcggcaggaggaagctggcgcacaggtgagcgtgccgagggctctggaccgacaggctgctctgctacagattcaggaattcatgatcacctgcctgtcacagactccgcctcggactaccctgctgctgtatcctacagcagtggacctggcaaagagagctctttggacccctaaccagatcaccgatatcaccagcctcgtccggctggtctacattctgtctaagcagaatcagcagcacctgatccctcagtgggctctcagacagatcgccgatttcgccctgaagctgcacaagacccacctggcttctttcctgagcgctttcgccagacaggaactgtacctgatgggatcgcttgtgcacagcatgctggtgcacacaactgagaggagagagattttcattgtggagactggcctgtgcagcctggccgagctgtcccatttcacccagctcctcgctcatccgcaccacgagtacctctccgacctctataccccttgctcctcttccggccggcgcgatcacagcctggaaagactcactagactgttcccagacgctaccgtgccggctactgtcccggcagcactgagcatcctgagcactatgcagccttctacgctggaaaccttcccggacctgttctgcctgccactcggagaaagcttctctgccctgacggtgagtgagcacgtgtcgtacatcgtgacaaaccagtacctgatcaagggtatcagctacccagtgtccacaactgtggtgggccagagcctgatcatcacccagaccgatagccaaacaaagtgcgaactgacaagaaacatgcataccactcattccatcactgtggccttaaacatctccctggagaactgcgccttctgtcagtccgccctgctggagtacgatgatacccagggcgttattaatatcatgtacatgcatgatagcgacgatgtgcttttcgccctggacccatacaacgaggtggtggtgtccagccctagaacccactacctcatgctgctgaagaacggcacagtgctggaggtgaccgacgtggtggtggacgctacggacagcaggctgctgatgatgagcgtgtacgccctgagcgccattatcggaatatacctgctgtacaggatgttgaagacctgt

SEQ ID NO: 170 - DNA, 2226 bp, Artificial Sequence
  Synthetic nucleotide sequence
atgcggccgggactccctagctacctcatcatcctcgccgtgtgccttttctctcaccttttgagctccagatacggcgccgaagcggtgtccgagcctctcgacaaggccttccacctccttctcaacacatacggcagaccgatccggttcttgagggagaacactacccaatgcacatataacagtagcctgcggaatagcactgtggtgcgggagaacgccatcagcttcaatttcttccagagctacaatcagtattacgtgttccacatgcctagatgtctgttcgcgggccctctggcagagcagttcctgaaccaggttgatctcacagagacactggagagataccagcaaagactgaacacctacgctctcgtctccaaggacctggccagctataggagcttcagccagcagctgaaggcccaggattccctgggagagcagccaaccaccgtcccgccgccaatcgacctctctatcccacacgtgtggatgcctccacaaaccacaccacacggatggactgagtcccataccaccagcggactgcacaggcctcacttcaatcagacctgcattttgttcgacggccacgacctcctgttcagcactgtgaccccgtgtctgcatcagggcttctacctgattgacgagctgaggtacgtcaagattacgctcaccgaagacttcttcgtggtcacagtgagtatcgatgacgacacccctatgctgctcatcttcggccatctgcctagggtgctgttcaaggccccttaccagagagataatttcatcttgcggcagactgagaagcacgaactgctggtactcgtgaagaaggaccagctgaaccgccactcttacttaaaggatccagacttcctggatgcagcacttgacttcaactatctcgacctctctgccctgctgaggaacagcttccaccggtatgccgtggacgtgctgaagagtggacggtgtcagatgctggaccgcagaacagtggaaatggcgttcgcgtatgctctggccctattcgcggccgcaagacaggaggaggccggcgctcaggtgtccgtccctagagctctggacaggcaggccgccctgctgcaaattcaggagttcatgataacttgcctgagccaaacccctccgagaacaacactgctgctgtatccaacagccgtagatctggccaagcgggccctttggactcctaaccagatcaccgatattacctccctggtgagactggtgtacattctgtccaagcagaaccagcagcacctgatcccgcagtgggccctgagacagatcgctgatttcgccttgaagctgcacaagactcatctggcctccttcctgagtgctttcgcccgccaggaactgtatctgatgggctctcttgtccattccatgctggttcataccacggagagaagggagatcttcatcgtggaaaccggcctttgctccctcgctgagctgagccatttcactcagctgctcgcccacccgcaccacgagtacctgtcagacctttatactccgtgctcctccagcggcaggagggaccacagcctggaacggctcacaagactgttcccggatgctaccgtgcctgctactgtgccagccgccctgagcatcctttccaccatgcagccttccacactggagactttccctgacctgttctgcctgccacttggcgaaagtttcagcgccctgaccgtgtccgaacatgtgagctacatcgtgactaaccagtacctgatcaagggcatcagctacccggttagcaccactgtcgtcggacagtcactgatcatcactcagaccgactcccagaccaagtgcgaactgaccagaaatatgcacacaacccatagcatcaccgtggccctgaacattagcctggagaactgtgccttctgccagagcgccctcctcgagtacgacgatacccagggtgtgataaacattatgtatatgcacgacagtgacgacgttctgttcgcactggacccttacaacgaagtggtcgtttcctctcctcggacccattacctgatgctgctgaagaacggcaccgtgctagaggttactgatgtggtagtggacgccacagacagcagactgctgatgatgagcgtgtacgccctgagcgccattattggcatctacctgctgtacaggatgctgaagacatgt

SEQ ID NO: 171 - DNA, 2226 bp, Artificial Sequence
  Synthetic nucleotide sequence
atgcggccgggactcccttcctacctcatcatccttgccgtgtgtcttttctcacacctcctcagcagccgctacggcgccgaggccgtgtcagagccacttgacaaggccttccatcttttgttgaacacctacggcagacctattcggttcctgagagagaacacaacccagtgcacctataacagctctctgcgcaactccacagtggttagagagaatgccatcagcttcaacttcttccagagttacaaccagtattacgtgttccatatgcctaggtgcctgttcgctggcccgttagccgaacagttcctcaaccaggtggatctgaccgaaacactggaaaggtaccagcagcggctgaatacatacgccttggtgtcaaaggatcttgcttcctacagaagcttcagccagcagctgaaggcccaggacagccttggagagcagccaaccaccgtgcctcctcctattgacctgagcatccctcatgtgtggatgcctcctcagaccacccctcacggctggactgagagccataccacgtccggcctgcacaggcctcacttcaatcagacctgcatcctgttcgacggccacgatctgcttttcagcaccgtcaccccttgcctgcaccagggattctacctgatcgacgagctccggtatgtgaagattacactgaccgaggacttcttcgtggtgaccgtgtccatcgacgatgacaccccaatgctgctgatcttcggccacctgccgagagtcctgttcaaggccccataccagagagacaacttcatcctgcggcagaccgagaagcacgaactgctagtgctggtgaagaaggatcagctgaaccggcactcctacctgaaggaccctgacttccttgacgccgcactcgacttcaactacctggacctcagtgctctactgaggaactctttccaccggtacgccgtggacgtgctgaagtctggaagatgccagatgctggataggaggacagtggagatggcgttcgcgtacgccctggccctgttcgccgccgccagacaggaggaggccggcgcacaggtcagcgtcccaagggccctggaccgccaggctgccctgctgcagattcaggaattcatgatcacctgtctcagccagacccctccgagaacaaccctgctgttgtacccgaccgcagtggatctggctaagagggccctgtggaccccaaaccagattaccgacatcacctctctggtgagactggtgtacatcctgtccaagcagaaccaacagcacctcattccacaatgggccctgaggcaaatcgccgatttcgctctcaagttgcataagacccatctggcctcattcctcagcgccttcgcaagacaggagttgtatctcatgggctccctcgtgcatagcatgctggtgcacacaaccgagcgcagagaaattttcatcgttgaaaccggactgtgcagcctcgccgagttgtctcatttcacccagctgctggctcatcctcaccatgagtatctttccgacctgtacaccccgtgcagcagcagcggccgcagggatcacagcctcgagagactgacaagactgttcccagacgccaccgtgcctgccacagtgccagccgcgctgtccatcctgagcacaatgcagcctagcacactggagactttcccagatctgttctgtcttccactgggcgagagcttcagcgccctgaccgtgagcgagcacgtgagctacatagtgaccaaccaatatttgattaagggcatctcctaccctgtgagcaccacagtggtgggccagtctctgatcatcacacaaaccgacagtcagacgaagtgcgagctgactagaaacatgcacacgacccacagcataaccgtggcactcaacatctccctggagaattgcgccttctgccagagcgccctcctggagtacgacgacactcaaggagtgatcaacatcatgtacatgcacgatagcgatgacgtgctgttcgccctggacccatacaatgaagtggtggtgtccagcccacggacccactacctgatgctcctcaagaacggcacagtgctggaggttacagacgtggtggtcgacgctaccgatagcagacttcttatgatgtccgtgtacgccctgagcgccatcatcggaatctatctgctttacaggatgctgaagacttgc

SEQ ID NO: 172 - DNA, 2226 bp, Artificial Sequence
  Synthetic nucleotide sequence
atgcggccaggcctcccttcgtaccttatcatcttggccgtgtgtcttttctctcacctactctcctcaaggtacggcgccgaggccgtgagtgagccgctagacaaggccttccacctattacttaacacctacggccggcctatccgattcctccgggagaataccacacagtgtacatacaactctagcctgcgcaacagcactgtggtcagggagaacgccatcagcttcaatttcttccagagttataaccagtactacgtgttccacatgccaagatgcctgttcgccggacctcttgccgagcagttcctgaaccaggtggatctgaccgagacactggagagataccagcaaaggctcaatacctacgctttagtgagcaaggaccttgcttcttacagatctttctcacaacagcttaaggcgcaggacagcctcggcgagcagcctaccaccgtgcctcctcctattgacttgagcatcccacacgtatggatgcctccacagacgacaccacacggctggaccgaatcccatacaaccagcggactccaccggcctcatttcaatcagacctgcatccttttcgacggccatgacctgctattctctaccgtcaccccgtgcctgcaccagggcttctaccttatcgacgaactgagatacgtcaagatcacgctgaccgaagacttcttcgtcgttacagtcagcatcgacgacgatacccctatgctgctgatattcggccaccttcctagagtcctgttcaaggcaccgtaccagagggacaacttcatcctgagacagacagagaagcacgagctcctggtgctggtgaagaaggatcagctgaatagacacagttacctgaaggatccagacttcctggacgccgcactggacttcaactatctggatctgagcgccctgcttcgcaatagcttccatagatacgctgtggacgtgctgaagtctggccggtgtcagatgctggatcgtaggaccgtggagatggccttcgcctacgcactcgctctgttcgccgccgctagacaggaggaggccggagcccaagtgagtgtgcctcgggcactggacagacaggcagccttactgcagatccaggagttcatgattacctgcctgtctcagactccaccacggaccacccttctgctgtatcctaccgcggttgatctggctaagagggccctgtggacccctaaccagatcactgacatcaccagcctcgtgaggctggtgtacattcttagcaagcagaaccagcagcacctaatacctcagtgggccctgcggcagatcgccgacttcgccctgaagctgcacaagacccacctggcaagcttcctgtccgccttcgcccgccaggagctgtacctcatgggaagtctggtacactccatgctggtgcacaccaccgagagaagagagatcttcatcgtagaaaccggactctgctcactggccgaattgtcacacttcacccagctgctggcccatcctcatcacgagtatctgtccgacctgtacaccccttgcagctctagcggcaggcgggaccattccttggagaggctgaccaggctgttcccggatgccaccgttccagcaacagtgcctgcagccctgagcattctgtcaacaatgcagcctagcaccctcgaaactttcccggatctgttctgcctgcctcttggtgagagcttcagcgccctgaccgtgtccgagcatgtgtcttatatcgtaaccaatcagtacctgatcaagggcatcagctaccctgtgtccacaactgtcgtgggccaaagcctcatcataacccagaccgattcccagacaaagtgtgaactgacccgcaacatgcacaccactcacagcattactgtggccctgaacatctccctggagaactgtgccttctgtcagagcgcgcttctggagtatgatgacacccagggtgtgattaatatcatgtacatgcacgacagcgacgatgtgctgttcgcgctggatccttacaatgaggtggtcgtgagctcccctagaacccactatctcatgctgttaaagaacggcaccgtcctggaggtgacagacgtggtggttgatgccaccgacagcaggctgctgatgatgagcgtttatgccctgagcgccatcatcggcatttacctcctgtacaggatgttaaagacttgt

SEQ ID NO: 173 - DNA, 2226 bp, Artificial Sequence
  Synthetic nucleotide sequence
atgcggccaggactccctagctacctcattatcctcgccgtgtgccttttctctcacctcttaagctcccggtacggcgccgaagccgtgagcgagccgcttgacaaggctttccacctcctccttaacacctacggcagacctattagattcctgagagagaacaccacccagtgtacatataattctagcctgcggaactccaccgtagtgagggagaatgccattagcttcaacttcttccagagctacaaccagtactatgtgttccatatgccgagatgtctgttcgctggacctctcgcagaacagttcttgaaccaggtggatctgactgaaactctcgagcggtaccagcaaagactgaatacctatgccttggtaagcaaggatctggctagctacaggagcttctcccagcagctcaaggcccaggactcccttggcgaacagcctaccaccgtccctcctccaattgacctgagcattccgcacgtgtggatgcctcctcagaccaccccacacggctggacagagtctcataccaccagcggactgcatagaccgcatttcaaccagacttgcatcctgttcgatggacatgatctcctgttctctacagtgactccatgcctgcaccagggcttctacctgatcgatgagctcagatacgtcaagatcaccttgaccgaagatttcttcgtggtcacagtgagcattgacgacgacaccccaatgcttctgatattcggtcacctgcctagggtcctcttcaaggctccataccagagagacaatttcatccttagacagaccgagaagcacgagctgctcgtgctggtgaagaaggatcaactgaacagacatagctacctaaaggatccggatttcctggacgccgctctggacttcaactacctcgacctcagcgccctgctgaggaacagcttccaccggtatgcagtcgatgttctcaagtccggcagatgccagatgctggaccgtagaactgtggagatggccttcgcctatgctctggccctgttcgccgccgcacgccaggaagaggctggagcccaggtgagcgtcccacgggctctggacagacaggctgctctgctgcagatccaagagttcatgattacctgtctgagccagacccctcctagaaccaccctcctcctctatccgaccgctgtggacctggccaagagagccttgtggacccctaatcagattactgacatcacaagcctggtcagactggtgtatatcctgagcaagcagaatcagcagcacctcattccacagtgggcgctgcggcagatcgctgatttcgccctgaagctgcacaagacccacctggccagcttcttgagcgcattcgcacggcaggaactctacctgatgggctctctggtgcacagcatgctcgtccacaccacagaacggcgagagatattcatcgttgagacaggcctgtgctctctggccgagttgtcccacttcacccaactgctggctcaccctcatcacgagtacctcagcgacctgtacaccccttgctcctccagcggtagacgggatcacagcctggaaagactgaccagactgttcccagacgccacggtccctgcaaccgtgcctgccgctctttcaatcttgtccaccatgcagcctagtacactggaaacattccctgacctcttctgcctgcctctcggagagtccttctcagccctgaccgtgagcgaacacgtgtcctacatcgtgaccaaccagtacctgatcaagggcatctcctaccctgtgtcgaccaccgtcgtgggccagagcctgatcattacacagacggactctcagaccaagtgcgagttgacacggaacatgcacaccacacacagcatcactgtggccctgaatattagcctcgagaactgcgccttctgccagagtgccctgctagagtatgatgatacacagggcgtgattaatatcatgtatatgcacgactctgatgacgtcctgttcgccctggacccatacaacgaggtggttgtgagctcccctcggacccactatctgatgctgctcaagaacggcactgttctcgaggtgacagatgtggtggtcgatgccacagattctcggctgctgatgatgagcgtgtacgctcttagcgccatcatcggaatctacctcctgtacaggatgctgaagacttgt

SEQ ID NO: 174 - DNA, 2226 bp, Artificial Sequence
  Synthetic nucleotide sequence
atgcggccgggcctcccgtcttacctcatcatcttggccgtgtgcctcttctcccacctcttgagctcccggtacggcgcagaggccgtgtcagagcctctcgacaaggccttccatttgctccttaacacatacggcaggccaatcaggttcctgcgagagaataccacacaatgcacctacaactccagcttgaggaatagcaccgtggtgcgggagaacgccatctccttcaatttcttccagtcctacaatcagtattatgtgttccatatgcctaggtgtctcttcgcaggcccacttgccgaacaattcctgaaccaagtggacctgacagagacactggagagataccagcaacggctgaatacctacgccttggtgagcaaggatctcgccagctacagatctttctcacaacaactgaaggcccaggattctctcggtgagcagccaacgactgtgcctcctccaattgacctgtctatcccacatgtgtggatgccacctcagactacccctcacggatggacagagtctcataccactagcggcctgcacaggcctcacttcaatcagacctgtatcctcttcgacggtcacgatctgttgttcagcaccgtgaccccatgcctgcatcagggcttctacctgattgacgagctgagatatgtgaagataacactgaccgaggatttcttcgtggtcaccgtgagcatagacgacgacacaccgatgctcctgatcttcggccatctgccacgagttctgttcaaggcaccttatcagagagacaacttcatcttgaggcaaacagagaagcacgagcttctcgtgctggttaagaaggaccagctcaacaggcatagctacctgaaggacccagatttcctggacgccgctctggatttcaattatctggacctttctgctctgctgagaaacagcttccatagatacgccgtggacgtccttaagtctggccgctgccagatgctggatagacggactgtcgagatggcattcgcctacgctctggctctgttcgccgccgccaggcaggaggaggctggagcccaagtgtcagtgcctagggctctggatagacaagccgccttgctccagatccaggagttcatgattacctgtctgagccagaccccaccaagaaccacgttactgctgtaccctaccgctgtggacctggctaagcgagccctctggacgcctaatcaaatcaccgacatcaccagcttagtcagactggtgtacattctgtctaagcagaaccagcagcacttgattccacagtgggccctgagacagattgccgacttcgccctgaagctccataagacccatctggcgtccttcctgagcgccttcgccagacaggagctctacctgatgggcagcctggttcattccatgctggtccatacaacggagagaagagagatcttcatcgtggagacaggactgtgctctttggccgaactttcccacttcactcagctgctggcgcaccctcatcacgagtacttatcggacctgtacaccccttgcagcagcagcggaaggagggaccattctctcgaaaggctgacaagactgttccctgacgccaccgtcccagccacagtgcctgccgcactgagcatcctcagcacaatgcagccaagcactctggagactttcccggacttgttctgcctgccgctgggcgagtccttcagcgcccttacagtgtcagagcatgtgtcctacatcgtgaccaatcagtacctgatcaagggaatcagctaccctgtgtctacaaccgtggttggccagtccctcatcatcacccagacagatagccaaactaagtgcgaactgactagaaacatgcacacaacccactccatcacagtggccctgaacatcagcctcgagaattgcgccttctgccagagcgcactgttggagtacgacgatactcagggcgtgattaacatcatgtacatgcatgatagcgacgatgtgctgttcgccctggacccttataacgaggtggtggtgagtagtcctaggacccattaccttatgctgctgaagaacggaactgttctggaggttaccgacgtcgtcgttgacgctaccgactcacgcctgctcatgatgtctgtgtatgccctgtctgccatcatcggcatctacctgctgtataggatgctgaagacttgc

SEQ ID NO: 175 - DNA, 2226 bp, Artificial Sequence
  Synthetic nucleotide sequence
atgcggcccggccttcccagctacctcatcatcctcgccgtgtgcttgttcagccaccttctaagcagccggtacggcgccgaggccgtgagcgagcccctcgacaaggccttccacttgttattgaacacctacggccggcccatccggttcctgcgggagaacaccacccagtgcacctacaacagcagcctgcggaacagcaccgtggttcgggagaatgccatcagcttcaacttcttccagagctacaaccagtactacgtgttccacatgccccggtgtcttttcgccggaccgctggccgagcagttcctgaaccaggtggacctgaccgaaactctggagcggtaccagcagcggctgaatacctatgccctggtgagcaaggacctggcctcataccggagcttcagccagcagctgaaggcccaggacagcctgggcgagcagcccaccaccgtgcctccacccatcgacctgagcatcccgcacgtgtggatgcctccacagaccacacctcacggctggaccgagagccacaccaccagcggcctgcaccggccccacttcaaccagacctgcatcctgttcgacggccacgacctgctgttcagcacagttaccccttgccttcatcagggcttctatcttatagacgagctgcggtacgtgaagatcacactcaccgaggacttcttcgtggtgaccgtgagcatcgacgacgacactcctatgctcctcatcttcggccatcttccccgggttctgttcaaggctccataccagcgggacaacttcatcctgcggcagaccgagaagcacgagttgctggtgctggtgaagaaggaccagctgaaccggcattcgtaccttaaggaccccgacttcctggacgccgccctggacttcaactacctagatctcagcgccctgttgaggaatagcttccaccggtacgccgtggacgtgttaaagagcggccggtgccagatgctggatcggcggaccgtggagatggccttcgcctacgcgctggccttgttcgctgccgcccggcaggaggaggccggcgcccaggtgagcgtaccgcgggcactcgatcggcaggccgctctgctgcagatccaggagttcatgatcacctgcctgagccagacccctccgcggaccaccttactgctttaccccactgcagttgacctggctaagcgcgcactctggacccctaaccagatcaccgacatcaccagcctggtgcggctggtgtacatcctgagcaagcagaaccagcaacacctgataccacagtgggctctgagacagatcgccgacttcgccctgaagctgcacaagacccatctggccagcttcctgtccgctttcgcacgacaggagctgtacctgatgggatcactcgtgcacagcatgctcgtgcataccaccgagcggcgggagatcttcatcgtggaaacaggcctgtgttcactagccgaactgagccacttcacccaacttttggcccatccacaccacgagtatttgtcggacctgtacaccccttgttcctcttccggaaggcgggaccactccctggaacggctgacccggctgttccccgacgcaaccgtaccggccacggttccagctgccttaagcatcttaagtaccatgcagcccagcacactggaaaccttcccagatctgttctgcctgccgctgggtgagtctttcagcgctctcaccgtgtccgagcacgtgagctacatcgtgacaaatcaatatctgattaagggcatcagctacccagtgtcaactacggtggttggccagagcttgattataacccagaccgactcgcagactaagtgcgagcttacgagaaacatgcacacaacccacagcatcaccgtggccctgaacataagtctggagaactgcgccttctgccagtctgccttgctcgagtatgatgacacccagggcgtgatcaacatcatgtacatgcatgacagcgacgatgttctcttcgcgttggatccatacaacgaggtggtggtgtccagtccgagaactcactatctgatgctcctaaagaacggcaccgtgctggaggtgaccgacgtcgtggtcgatgccacggactccagactgcttatgatgagcgtgtacgccctaagcgccatcatcggcatctatctcctgtatcggatgcttaagacctgc

SEQ ID NO: 176 - DNA, 2226 bp, Artificial Sequence
  Synthetic nucleotide sequence
atgcggcccggccttcccagctacctcatcatcctcgccgtgtgcttgttcagccacttgcttagcagccggtacggcgccgaggccgtgagcgagcccttggacaaggccttccacttactcctcaacacctacggccggcccatccggttcctgcgggagaacaccacccagtgcacctacaacagcagcctgcggaacagcaccgtggtgcgtgagaacgccatcagcttcaacttcttccagagctacaaccagtactacgtgttccacatgcccaggtgccttttcgccggaccactggccgagcagttcctgaaccaggtggacctgaccgaaacactggagcggtaccagcagaggctgaacacatacgccctggtgagcaaggacctggcctcctaccggagcttcagccagcagctgaaggcccaggacagcctgggcgagcagcccaccaccgtgccgccacccatcgacctgagcatcccacacgtgtggatgccaccacagaccacccctcacggctggaccgagagccacaccaccagcggcctgcaccggccccacttcaaccagacctgcatcctgttcgacggccacgacctgctgttctcgaccgtcaccccttgcttgcaccagggcttctatctgatagacgagctgcggtacgtgaagatcaccttgaccgaggacttcttcgtggtgaccgtgagcatcgacgacgacacacctatgctgctcatcttcggccatttaccccgggttctgttcaaggcaccataccagcgggacaacttcatcctgcggcagaccgagaagcatgagcttctggtgctggtgaagaaggaccagctgaaccggcactcatatctgaaggaccccgacttcctggacgccgccctggacttcaactacctggatttaagcgccctgctccgtaactctttccaccggtacgccgtggacgtgttaaagtcaggccggtgccagatgttggaccggcggaccgtggagatggccttcgcttacgcattagccctcttcgcagccgcccggcaggaggaggccggcgcgcaggtgagcgtgcctagagcgttggatagacaggcggccttgctgcagatccaggagttcatgatcacctgcctgagccagactcctccacggaccacattgctgctctaccccaccgccgttgacctggcaaagcgggcgctctggactccgaaccagatcaccgacatcaccagcctggtgcggctggtgtacatcctgagcaagcagaatcagcagcacctgataccacagtgggcactacgccagatcgccgacttcgccctgaagctgcacaagacccacctggccagcttcctgtctgctttcgcaaggcaggaactgtacctgatgggctctctagtgcacagcatgctcgtccataccacagagcggcgggagatcttcatcgtggagactggcctgtgctctcttgcggaactgagccacttcacccagctcctagcccacccacaccacgagtacctttctgacctgtacaccccgtgctcatcaagtggacggcgggaccactcgctggaaagactcacccggctgttccccgacgctactgtgccggcaactgtgcctgcggctctctctatattatctaccatgcagcccagcacactcgaaaccttccctgatctgttctgcctgcctctaggagagagcttctctgcccttacagtgtccgagcacgtgagctacatcgtgacaaaccaatacctcattaagggcatcagctaccctgttagtactaccgtcgtaggccagagcctaattatcacccagaccgactcccagacaaagtgcgaattaacgcgcaacatgcacacaacccacagcatcaccgtggccctgaacattagcctcgagaactgcgccttctgccagagtgccttgcttgagtatgatgatacccagggcgtgatcaacatcatgtacatgcacgacagcgacgatgtgctgttcgcactcgacccctacaacgaggtggtcgtaagcagtccaaggacccattatttgatgctgcttaagaacggcaccgtgctggaggtgaccgacgtggtggtagacgctacagactcccggctgcttatgatgagcgtgtacgcgctcagtgcgatcatcggcatctacctgctttatcggatgctaaagacctgc

SEQ ID NO: 177 - DNA, 2226 bp, Artificial Sequence
  Synthetic nucleotide sequence
atgcggcccggcttgcccagctacttgatcatcttggccgtgtgcttgttcagccacttacttagcagccggtacggcgccgaggccgtgtccgagcccctcgacaaggccttccacctcctcctcaacacctacggccgccccatccgcttcctccgcgagaacaccacccagtgcacctacaactcctccctccgcaactccaccgtcgtgcgggagaatgccatctccttcaacttcttccagtcctacaaccagtactacgtcttccacatgccccgctgcctcttcgccggacctctcgccgagcagttcctcaaccaggtcgacctcaccgagacgctcgagcgctaccagcagaggttgaatacctatgccctcgtctccaaggacctcgcctcctaccgctccttctcccagcagctcaaggcccaggactccctcggcgagcagcccaccaccgtgcctccaccaatcgacctctccatcccgcacgtctggatgcctccccagaccactccgcacggctggaccgagtcccacaccacctccggactgcatcgccctcacttcaaccagacctgcatcctcttcgacggccacgacctcctcttcagtaccgtgacgccatgcctgcaccagggcttctacctcatcgacgagctccgctacgtcaagatcacccttaccgaggacttcttcgtcgtcaccgtctcgattgacgacgacacaccaatgctcctcatcttcggccacctcccgcgcgtgctgttcaaggcgccctaccagcgcgacaacttcatcctgaggcagaccgagaagcacgagctgctcgtcctcgtcaagaaggaccagctcaaccgccactcctacctcaaggaccccgacttcctcgacgccgccctcgacttcaactacctcgatctgagtgctctgctgaggaattcattccaccgctacgccgtcgacgtcctcaagtccggccgctgccagatgctcgaccgccgcaccgtcgagatggccttcgcttacgcgctggcactcttcgctgccgcccgccaggaggaggccggcgcccaggtcagtgtgccaagagcactggatagacaggccgcacttttgcagatccaggagttcatgatcacctgcctctcccagactccgcctcgcaccacgttgttgttgtaccccacagcagtcgatctggctaagagagccttatggacacctaaccagatcaccgacatcacctccctcgttcggctggtctacatcctctccaagcagaatcagcagcacctgatccctcagtgggcactccgtcaaatcgccgacttcgccctcaagctccacaagacccacctggcgtctttcctcagtgcattcgctaggcaggagctgtacctgatgggcagtctcgtccactccatgctggtgcacaccacggagcgccgcgagatcttcatcgtcgagactggcctctgtagtttagccgagctcagtcacttcacccaactgctcgcccaccctcaccacgagtaccttagtgacctctataccccttgctctagttccggtcgccgcgaccacagcctggaacgtctgacccgcctcttccccgacgctacagtaccagcaaccgtgccagcggccctgtctatcctgtctaccatgcagccctccaccttggagacgttcccagatctgttctgcctccctctaggcgaatcgttctctgcactcacggtcagcgaacacgtctcctacatcgtcacaaaccagtatctgataaagggcatctcctacccagtgtcgaccactgttgtcggccagtccctcatcatcacacagactgattctcagactaagtgcgagttgacacggaacatgcatactacacattctatcaccgttgctttaaacataagcctggagaactgcgccttctgccagtccgctctgctcgagtacgacgatacgcagggcgtcatcaacatcatgtacatgcacgactccgatgacgttctgttcgcactggacccctacaacgaggtcgtcgtctcctctcctaggactcactacttaatgctgttgaagaacggcaccgtcctcgaggtcaccgacgtggtcgtcgatgctacagacagccgactgctcatgatgtccgtgtacgctctctccgccatcatcggcatctacctgctctaccgcatgctcaagacctgc

SEQ ID NO: 178 - DNA, 2226 bp, Artificial Sequence
  Synthetic nucleotide sequence
atgcggcccggcctacccagctaccttatcatcttagccgtgtgcttgttcagccacttgctcagcagccggtacggcgccgaggccgtgtccgagcccctcgacaaggccttccacctcctcctcaacacctacggccgccccatccgcttcctccgcgagaacaccacccagtgcacctacaactcctccctccgcaactccaccgtcgtcagagagaatgccatctccttcaacttcttccagtcctacaaccagtactacgtcttccacatgccccgctgcctcttcgccggcccactcgccgagcagttcctcaaccaggtcgacctcaccgaaactctcgagcgctaccagcagcggctgaatacgtatgccctcgtctccaaggacctcgcctcctaccgctccttctcccagcagctcaaggcccaggactccctcggcgagcagcccaccaccgtccctcctccaatcgacctctccatcccacacgtctggatgcctccccagaccactcctcacggctggaccgagtcccacaccacctccggcctccacaggccacacttcaaccagacctgcatcctcttcgacggccacgacctcctcttcagcacagtgacgccatgtctgcatcagggcttctacctcatcgacgagctccgctacgtcaagatcactctgacggaggacttcttcgtcgtcaccgtctctatagatgacgacaccccaatgctcctcatcttcggccacttgcctcgcgtgctgttcaaggctccctaccagcgcgacaacttcatcctccgccagaccgagaagcatgaattactcgtcctcgtcaagaaggaccagctcaaccgccactcctacctcaaggaccccgacttcctcgacgccgccctcgacttcaactacctggatcttagcgccctgctgcgtaacagcttccaccgctacgccgtcgacgtcctcaagtccggccgctgccagatgctcgaccgccgcaccgtcgagatggccttcgcctatgctctggccctgttcgctgccgcccgccaggaggaggccggcgcccaggtttccgttcctcgggctttagacagacaggctgccctgcttcagatccaggagttcatgatcacctgcctctcccagacgccaccacgcaccacactgttgctgtacccgacagcagtggacctggcaaagagggcactctggactccaaaccagatcaccgacatcacctccctcgtccgcctcgtctacatcctctccaagcagaaccagcaacacctgatacctcagtgggctctgcggcagatcgccgacttcgccctcaagctccacaagacccatttggcctccttcctgagtgccttcgctagacaggagctgtacctgatgggctccctggtgcactccatgctggttcacaccacagagcgccgcgagatcttcatcgtcgagacaggcctctgttcattggcagaactctcgcatttcacccagctgctggcccacccgcaccacgagtatctgagtgacctctacacaccatgcagttcgtcaggaaggcgcgaccacagcctggagcgactgacccgcctcttccccgacgcaacagtccctgctactgtccctgccgcgctgagtattttatcaacgatgcagccctccacgctcgaaaccttccctgacttgttctgcctccctcttggagagagtttcagtgccctgaccgtgtcagagcacgtctcctacatcgtcacgaaccagtatcttatcaagggcatctcctacccagtatcgactacagtggttggccagtccctcatcatcacccagactgacagtcaaactaagtgcgagcttactagaaacatgcacacaacccactccatcaccgttgcattaaacatcagcctcgagaactgcgccttctgccagagcgctctgctggagtacgacgacacacagggcgtcatcaacatcatgtacatgcacgactccgacgacgtcctgttcgcgcttgatccctacaacgaggtcgtcgtgtccagtccacgaactcattacctcatgctgcttaagaacggcaccgtcctcgaggtcaccgacgtggtcgtcgatgctaccgactcccgcctcctcatgatgtccgtttacgcactctctgcgatcatcggcatctacttactatatcgcatgctcaagacctgc

SEQ ID NO: 179 - DNA, 834 bp, Artificial Sequence
  Synthetic nucleotide sequence
atgtgcagaagaccagactgcggattcagcttctccccaggcccagtgatcttactttggtgctgcctcctccttccgattgtgagcagtgccgccgtgagcgtggctcctaccgcggccgagaaggtgccggccgagtgcccagagctcacccgaaggtgccttctgggcgaggttttcgagggagacaagtacgagtcttggctccggcctctggtcaacgtgacgggcagagacggccctttgagccagctcatcagatacagaccagtaacacctgaggccgccaattccgtcctgctggatgaggccttcctggacaccctcgccctcctttacaataacccagaccagctgagagccctgttgacccttctcagcagcgacaccgctccacggtggatgaccgtcatgagaggctatagcgagtgcggagatggcagccctgccgtctatacctgcgttgacgacctgtgcaggggctacgatttgacaaggctcagctacggcagatctatattcacagagcatgtgctgggcttcgagctggtgccgccatccctgttcaacgtggtggtcgctataaggaacgaggccaccagaacaaatcgcgccgtgagactgccggtgtccacggcagccgcacctgagggcattacactgttctatggcctctacaacgccgtgaaggagttctgtttgcggcaccagctggacccaccactgctcagacacctggataagtactacgctggcctgcctccggagctgaagcaaacacgtgtgaatctgccagcccactctcggtacggaccgcaggccgtggacgcccgg

SEQ ID NO: 180 - DNA, 834 bp, Artificial Sequence
  Synthetic nucleotide sequence
atgtgcaggaggccagactgcggcttctcattcagcccaggcccagtcatcctcctttggtgttgcctccttctccctatagttagcagtgccgccgtgagcgtggcccctacagccgcggagaaggtgccagcggagtgcccggagttaaccagacgttgcctcttgggcgaggtgttcgagggcgataagtatgagtcctggctgcggcctctggtgaacgtgaccggcagagacggacctctgtcccagctgatcagatacagaccagtgacccctgaagccgcaaacagcgtgctgctggacgaggccttcctggacaccctggccctgttatacaacaaccctgaccagcttcgcgcgctgcttacactgctgagcagcgataccgccccaagatggatgactgtgatgaggggatatagcgagtgtggcgacggcagccctgccgtctacacctgtgtggacgacctctgcagaggctatgacctgaccagactgtcatacggccgaagcatcttcaccgagcacgtcttaggattcgagctggtgcctccaagcctcttcaatgtggtggtggccattcggaacgaggctaccagaaccaaccgggcggtgcgtcttccagtttctacagccgccgccccggaaggaattaccctgttctacggcctgtacaacgctgtcaaggagttctgcctgagacaccagctggatccaccgctgctgcgccacttggacaagtactatgcgggcctccctcctgagctcaagcagacgagggtgaacctccctgctcactcacgttatggaccacaggccgtggacgctaga

SEQ ID NO: 181 - DNA, 834 bp, Artificial Sequence
  Synthetic nucleotide sequence
atgtgcagaaggccagactgcggcttcagcttctctccaggaccagtgatcctcctctggtgctgccttctcctccctattgtgtcctccgccgccgtgtccgtggccccaaccgccgccgagaaggtgccagcggagtgcccagagctcaccaggcgctgtctgctgggcgaggtgttcgagggcgataagtacgagagttggctgaggccgttggtgaacgtgacgggcagggacggcccgctaagtcagttaataaggtaccggccagtgaccccggaggccgccaacagcgtgctgctggatgaggccttcttggacaccctggccctgttgtacaacaacccagaccagctgagagccctgctgactctgttgagcagcgacaccgccccaagatggatgaccgtgatgagaggctatagcgagtgcggcgatggcagccctgccgtgtacacgtgcgtggacgatttgtgtagaggctacgacctcaccagactgagctacggcagaagcatcttcactgagcatgtgctgggattcgagctggtgcctcctagcctgttcaatgttgtggtggctatacgcaacgaggccacaagaacaaacagggccgtaagactcccagtgagcaccgctgcagcccctgagggaatcacgctgttctacggcctctacaacgctgtgaaggagttctgtctgaggcaccaactggacccacctctgcttagacacctggataagtactacgccggcctcccacctgaactgaagcagaccagggtgaatcttcctgcacactcaaggtatggcccacaggccgtggatgccagg

SEQ ID NO: 182 - DNA, 834 bp, Artificial Sequence
  Synthetic nucleotide sequence
atgtgcaggcggccagactgcggcttcagcttctcaccgggcccagtcatcttgttgtggtgctgcctcctcctccctatcgtaagctcggcagccgtcagtgtggccccaaccgccgccgagaaggttccagccgagtgtccagaactcacaaggcggtgcctgctgggcgaggtcttcgagggcgacaagtatgaaagctggctcaggccacttgtcaatgtgacaggcagagacggcccactgagccagcttatccggtatagacctgtcactcctgaggccgctaacagcgtgcttctggacgaggctttcctggacactctggctctgctttacaacaacccagaccagctgagagccctgctgaccctgctgagcagcgatacagccccaaggtggatgacagttatgaggggatacagcgagtgtggcgacggaagcccagccgtgtatacctgcgtggatgacctgtgcagaggctacgacctgacccgcctctcctacggaagatccatcttcaccgagcacgtgctaggattcgagctcgtccctcctagcctgttcaatgtggtggtggccatcagaaacgaggccactcggaccaatagagcagtgagactgccagtgagcaccgcggccgcaccagagggtatcacactgttctacggcctgtacaacgccgtgaaggagttctgtctgcgtcaccagctggacccacctctgcttagacatctggataagtactatgccggcctgcctcctgaactcaagcagacccgtgtgaatctgcctgcccactccagatacggccctcaggccgtggacgcaagg

SEQ ID NO: 183 - DNA, 834 bp, Artificial Sequence
  Synthetic nucleotide sequence
atgtgtagacgaccagactgcggcttctctttctctccaggcccggtgatcttactctggtgttgtttgctccttcctatcgttagtagcgccgccgtgagcgtggctccgacagccgccgagaaggtgccagccgagtgcccagagctcaccagaagatgtctgctgggcgaggtcttcgaaggcgacaagtacgagtcttggctgaggcctctcgtgaatgttaccggcagggacggcccactgagccagctgattaggtaccggccagtgaccccggaagccgccaacagcgtgctgctggatgaagccttcctggacaccctggccctgctgtacaacaatcctgaccagctccgggccctgctgaccctcctcagcagcgacactgcccctcggtggatgacagtcatgagaggctactccgaatgtggagacggcagccctgccgtctacacctgtgtggacgacctctgtaggggctacgacctgacaagactgtcctatggcagaagcattttcaccgagcatgtgcttggcttcgagctggtgcctccatccctgttcaacgtggttgtggccattagaaacgaggccaccagaaccaacagggccgtgcggctgccagtgagtacagccgctgctccagagggcattaccctgttctacggcctttacaatgccgtgaaggagttctgtctgcgccatcagctggaccctcctctgctgagacacctggataagtattacgcgggcctgcctccagaactgaagcagacccgcgtcaacctgccagctcatagccgttacggcccgcaagcagtggacgcccga

SEQ ID NO: 184 - DNA, 834 bp, Artificial Sequence
  Synthetic nucleotide sequence
atgtgccgaagaccggactgcggcttcagcttcagcccaggcccggttatcctcctctggtgctgcctccttctcccaatcgtgagcagcgccgccgtgagcgtggcgcctaccgccgcggagaaggtcccagccgagtgcccagaattgacgaggagatgcttgctgggcgaagtgttcgagggcgataagtatgagagctggctgcggcctctggtcaacgtgaccggccgcgacggcccactgtcccagctgatcaggtacagaccagtgaccccagaggctgctaacagcgtgctgctggatgaggctttcctcgacacgctggctctcctgtacaacaatccggatcagctcagagccctgctcacactgctgtccagcgacaccgctccaaggtggatgacagtgatgcggggctactcagagtgcggcgacggtagccctgcggtgtatacatgtgtggacgacctgtgcagaggctacgacttaaccaggctgtcctacggtagatccatcttcactgagcacgtgctgggcttcgagctggtgccacctagcctgttcaatgtcgtggtagccatccggaacgaggctaccagaacaaatcgggccgtgaggctcccagtgagcaccgccgccgctcctgagggcatcactctgttctacggactttacaacgccgtcaaggagttctgcctgcggcaccagctcgatccacctctgctgagacacctggacaagtactacgccggccttccgcctgagctgaagcagaccagagtcaacctgcctgcccatagcagatacggcccacaggctgtggatgccaga

SEQ ID NO: 185 - DNA, 834 bp, Artificial Sequence
  Synthetic nucleotide sequence
atgtgccggcggcccgactgcggcttcagcttcagccccggccccgtgatcctattgtggtgctgcctacttttgcccatcgtgagcagcgccgccgtgagcgtggctcctaccgccgccgagaaggtgcccgccgagtgccccgagctaacccggcggtgccttcttggcgaggtgttcgagggcgacaagtacgagagctggctgcggcccctggtgaacgtgaccggccgggacggccctctgagccagctgatccggtaccggcccgtgacaccagaggccgccaacagcgtgctgctggacgaggccttcctggacaccctggccctgctgtacaacaaccccgaccagctgagagctctgctgacgctgctgtcaagcgacaccgcgccacggtggatgaccgtgatgcggggctacagcgagtgcggcgacggcagccccgccgtgtacacctgcgtggacgacctgtgcaggggctatgacctgacccgtctgagctacggccggagcatcttcaccgagcacgtgctgggcttcgagctggtgcctcccagcctgttcaacgtggtggtggccatccggaacgaggccacccggaccaaccgggccgtgcggctgcccgtgagcaccgcagcagccccagaaggcatcaccctgttctacggcctgtacaatgccgtgaaggagttctgcctgcggcaccagctggacccacctcttctcaggcacctggataagtactacgccggcctgcctcctgaactgaagcagacccgggtgaacctgcccgcccacagccggtatggcccacaggccgtggacgcccgg

SEQ ID NO: 186 - DNA, 834 bp, Artificial Sequence
  Synthetic nucleotide sequence
atgtgccggcggcccgactgcggcttcagcttcagccccggccccgtgatcctcctctggtgctgcctcttgttgcccatcgtgagcagcgccgccgtgagcgtggctcctaccgccgccgagaaggtgcccgccgagtgccccgagctcacccggcggtgccttctgggcgaggtgttcgagggcgacaagtacgagagctggctgcggcccctggtgaacgtgaccggccgggacggccctctgagccagctgatccggtaccggcccgtgactccagaggccgccaacagcgtgctgctggacgaggccttcctggacaccctggccctgctgtacaacaaccccgaccagctgagggcccttctgaccctgctcagcagcgacaccgccccacggtggatgaccgtgatgcggggctacagcgagtgcggcgacggcagccccgccgtgtacacctgcgtggacgacctgtgcaggggctacgacctgaccaggctgagctacggccggagcatcttcaccgagcacgtgctgggcttcgagctggtgccgcccagcctgttcaacgtggtggtggccatccggaacgaggccacccggaccaaccgggccgtgcggctgcccgtgtcgacagccgccgcccctgagggcatcaccctgttctacggcctatataacgccgtgaaggagttctgcctgcggcaccagctggacccgcccctgcttcgccacctggacaagtattacgccggcctgcctccggagctgaagcagacccgggtgaacctgcccgcccacagccggtacggccctcaggccgtggacgcccgg

SEQ ID NO: 187 - DNA, 834 bp, Artificial Sequence
  Synthetic nucleotide sequence
atgtgccggcggcccgactgcggcttcagcttcagccccggccccgtgatcctcctttggtgctgcttgctcttgcccatcgtgagcagcgccgccgtctccgtcgctcctaccgccgccgagaaggtccccgccgagtgccccgagctcacccgccgctgcctcctcggcgaggtcttcgagggcgacaagtacgagtcctggctcagacctctcgtcaacgtcaccggccgcgacggcccactctcccagctcatccgctaccgccccgtcacaccggaggccgccaactccgtcctcctcgacgaggccttcctcgacaccctcgccctcctctacaacaaccccgaccagctccgagccctgctgaccctgctgtcctccgacaccgctcctcgctggatgaccgtcatgcgcggctactccgagtgcggcgacggctccccagctgtgtacacctgcgtcgacgacctctgcagaggctacgacctgacgcgcctctcctacggccgctccatcttcaccgagcacgtcctcggcttcgagctcgtgcctccctccctcttcaacgtcgtcgtcgccatccgcaacgaggccacccgcaccaaccgcgccgtccgcctccccgtcagcacagccgctgcaccagagggcatcaccctcttctacggactgtacaacgccgtcaaggagttctgcctccgccaccagctcgacccacctctgctgaggcatctggacaagtattacgccggcctcccaccagagctgaagcagacccgcgtcaacctccccgcccactcccgctacggaccacaggccgtcgacgcccgc

SEQ ID NO: 188 - DNA, 834 bp, Artificial Sequence
  Synthetic nucleotide sequence
atgtgccggcggcccgactgcggcttcagcttcagccccggccccgtgatcctcctctggtgctgccttttgctccccatcgtgagcagcgccgccgtctccgtcgctcctaccgccgccgagaaggtccccgccgagtgccccgagctcacccgccgctgcctcctcggcgaggtcttcgagggcgacaagtacgagtcctggctcagacctctcgtcaacgtcaccggccgcgacggcccactctcccagctcatccgctaccgccccgtcaccccagaggccgccaactccgtcctcctcgacgaggccttcctcgacaccctcgccctcctctacaacaaccccgaccagctcagggcccttctaaccctgctgtcctccgacaccgcccctcgctggatgaccgtcatgcgcggctactccgagtgcggcgacggctccccggccgtgtacacctgcgtcgacgacctctgcagaggatacgacctcacccggctctcctacggccgctccatcttcaccgagcacgtcctcggcttcgagctcgtcccaccctccctcttcaacgtcgtcgtcgccatccgcaacgaggccacccgcaccaaccgcgccgtccgcctccccgtcagcacagccgcagccccagagggcatcaccctcttctacggcctgtataacgccgtcaaggagttctgcctccgccaccagctcgacccgcctctgctgaggcacctggacaagtattacgccggcctccctcctgagctgaagcagacccgcgtcaacctccccgcccactcccgctatggaccacaggccgtcgacgcccgc

SEQ ID NO: 189 - DNA, 2094 bp, Artificial Sequence
  Synthetic nucleotide sequence
atggagagcagaatttggtgcttggtggtgtgtgttaacctctgcattgtttgcctcggcgcagcagtgtctagcagctctactcggggaacatccgcaacccacagccaccatagctcacacaccaccagcgccgcccactccagatccggtagcgtgagccagcgggtgactagcagccagactgtgtcccatggcgtcaacgagacaatctacaacaccaccctgaagtacggcgacgtcgtgggcgtgaacacaacgaagtacccttacagggtgtgtagcatggctcagggcaccgacttgatccggttcgagagaaatattgtatgcaccagcatgaagccaattaacgaggatctggacgaaggcatcatggtagtgtataagagaaacatagttgcacacactttcaaggtgagggtctaccagaaggtgctgaccttccgccgaagctatgcttacatccatactacctacctgctcggttctaacaccgagtatgtggcacctccaatgtgggagatccaccacatcaattctcatagccagtgttacagctcttacagccgggtgatagccggcaccgtcttcgtggcctaccatagagattcatacgagaacaagaccatgcagctgatgccagacgactacagcaacacccattccaccaggtatgtgacagtcaaggaccaatggcactcacgcggctccacctggctgtacagggagacttgcaacctcaattgcatggtgaccatcaccaccgcccgcagcaagtacccgtaccacttcttcgccaccagcaccggagatgtcgtggacatcagccctttctataacggcactaacagaaacgccagttacttcggagagaatgccgacaagttcttcatcttcccgaactacactattgtgagcgatttcggtcgccctaactccgccctggagacacaccgcctggttgccttcctggagagagccgattccgtgatcagctgggacatccaggacgagaagaatgtgacctgtcagctcactttctgggaggcctccgagaggactatccggagcgaggccgaggactcataccatttcagcagcgccaagatgaccgccaccttcctgtcaaagaagcaggaggtgaacatgtcagatagcgctctggactgtgtgcgcgacgaggctattaacaagctgcagcagatcttcaatacctcctacaatcagacctacgagaagtatggtaacgtgtcagtattcgagacaactggcggcctcgtggtgttctggcagggaatcaagcagaagtccctggtggagcttgaaagactcgccaaccggagcagcctgaacctgacccacaacaggacaaagagatctacagatggtaacaacgccacccatctgagcaacatggagtccgtgcacaacctggtgtacgcccagctccagttcacatacgacaccctgagaggctacattaatagagccctcgcccaaatcgcagaggcctggtgcgtggaccagaggcgaaccctggaggtgttcaaggaattgagcaagatcaatccaagcgccatcttgagcgcaatctataacaagccgattgcggccagattcatgggcgacgtgttgggcctggcctcctgcgtcactatcaaccagacctctgtcaaggtgctcagagatatgaacgttaaggagtccccaggcagatgctatagcagacctgtcgtgattttcaatttcgccaactcaagctacgtgcagtacggccagctcggcgaagataacgagatcctgctgggcaaccacagaaccgaagagtgccagctgccttccctgaagattttcatcgctggcaactccgcttacgagtacgtggattacctgttcaagagaatgatcgacctcagcagcatcagcaccgtggacagcatgatcgccttagacattgaccctctggagaacacagatttcagggtgctggaactatactctcagaaggagctccggtctagcaacgtgttcgatctggaggagatcatgcgggagttcaattcctacaagcagcaccaccaccatcatcac

SEQ ID NO: 190 - DNA, 2094 bp, Artificial Sequence
  Synthetic nucleotide sequence
atggagtcaagaatctggtgtcttgtggtgtgcgtgaacttgtgtatcgtgtgtttgggcgcagccgtgtcctcaagcagcactagaggcactagcgccacccactcccatcatagctcacacaccacaagcgccgcccactctaggtcaggcagcgtgtctcagcgcgtgacctctagccagactgtgagtcacggagtcaatgaaaccatctacaacacaacactgaagtacggagacgtcgtgggcgtgaatacaaccaagtacccatacagggtgtgcagcatggctcagggcactgacctcatcagattcgagcggaacattgtgtgcacctcaatgaagcctatcaacgaggatttggatgaaggcatcatggtcgtgtacaagagaaacatcgtcgctcataccttcaaggtgagagtgtatcagaaggtgctgaccttcagacgtagctacgcttacattcacaccacctacctgctgggcagcaacaccgagtatgtggctcctcctatgtgggagatacatcacatcaacagccattctcagtgctatagttcttatagcagggtcatcgccggcaccgtcttcgtggcctaccatagagatagctacgagaacaagaccatgcagttgatgccggacgattacagcaatacccatagcactaggtacgtgactgtgaaggaccagtggcactcccggggtagcacctggctttacagggaaacctgcaatctgaactgcatggtgactattaccaccgccaggagcaagtatccttaccacttcttcgctacatctactggagacgtggtcgatatctctcctttctacaatggcacaaacagaaatgcttcatatttcggcgagaatgccgacaagttcttcatcttcccaaactacaccattgtgtccgacttcggaagacctaattccgccctggaaacccatagactggtcgcattcctggaaagggccgactccgtcatttcatgggacatccaggatgagaagaacgtcacctgtcagctcacattctgggaagcgagcgaaagaacaattcgcagcgaagccgaggacagctatcatttcagcagtgctaagatgaccgccactttcctgtctaagaagcaggaggtgaacatgtccgacagcgccttggattgcgtgagagacgaagctattaacaagctgcagcagatcttcaacacctcctacaaccagacttacgagaagtatggcaatgtgagtgtgttcgagacaaccggcggcctggtagtattctggcagggcatcaagcagaagtcactggtggagcttgagaggctggccaatagatccagcctgaacctgacccacaaccggacaaagagatctaccgacggaaacaacgccactcatctttccaatatggagagcgtgcacaacctggtgtacgcgcagctccagttcacctacgacacactgaggggctacataaacagggccctggcacagatcgccgaagcctggtgcgtggaccagagaaggaccctggaggttttcaaggagctgagcaagattaatccgtccgctatcctgagcgcaatatacaataagccaatcgccgccagattcatgggcgacgtgttgggactggccagttgcgtcacaataaaccagacctctgtaaaggtcctgagggacatgaatgtcaaggagagcccgggcaggtgctacagccgtcctgtggtgattttcaacttcgctaattcatcttacgtccagtacggccagctgggcgaagacaatgagatcttactgggcaaccataggactgaggagtgccagctgccgagtctgaagattttcatagccggcaatagcgcatatgaatatgtagactacctgttcaagaggatgattgacctctctagcatctcgaccgtggacagcatgatcgccctcgacatcgaccctctggagaacacagacttccgggtcctcgaactgtacagccagaaggagcttaggagctccaacgtgttcgatcttgaggagatcatgagggagttcaatagctataagcaacatcaccaccatcatcac

SEQ ID NO: 191 - DNA, 2094 bp, Artificial Sequence
  Synthetic nucleotide sequence
atggagagcagaatttggtgtctcgtggtgtgtgttaatctctgcatcgtgtgccttggcgccgccgtgtccagcagctccaccaggggcaccagcgcaacacacagccaccactctagccacacaaccagcgccgcccactctcgttcaggctccgtttcacagagggtgacctcctctcaaaccgtgtctcatggagtgaatgaaaccatttataacacaacactgaagtatggcgacgtggtgggcgtcaacaccaccaagtatccttaccgggtttgttcaatggcccagggcaccgatctcatcagattcgagcgaaatatcgtgtgtacatccatgaagcctatcaacgaagacctggacgagggaattatggtcgtgtacaagagaaatattgtggcccacactttcaaggtgagagtgtaccagaaggtgttgacattcaggcggtcctacgcctacatccacaccacttatctgttgggatccaacacagagtacgtcgcaccgcctatgtgggaaatacatcacatcaattcccattctcagtgctattctagctactccagagtgatcgccggcaccgtgttcgtggcctaccaccgcgatagctacgagaataagaccatgcagctgatgcctgacgattacagcaacactcattccacacgctacgtgaccgtgaaggatcagtggcacagccgcggcagcacctggctgtaccgggaaacctgcaacctgaactgcatggtgacaataacaaccgcacgtagcaagtacccataccacttcttcgccacctccaccggtgacgtggtcgacatcagccctttctacaatggcaccaacagaaatgcctcctacttcggcgagaacgccgacaagttcttcatcttccctaattatacaattgtgagcgacttcggcaggcctaacagcgccctggagactcatcgcttggtggctttcctggaacgcgctgacagcgtcatctcttgggatatccaagatgagaagaacgtgacctgccagctgaccttctgggaggccagcgagaggacaatcagaagcgaagccgaggactcttaccatttcagttcagctaagatgaccgccaccttcctgagcaagaagcaggaagtgaatatgtccgattccgctcttgactgcgtcagggacgaagccatcaacaagctccagcagattttcaatacttcttataatcagacctatgagaagtacggcaatgtcagcgtcttcgagacgaccggcggcctggttgtgttctggcaaggaatcaagcagaagtcactggtggagcttgagcggctggccaacagatccagcttgaacctgacccataatcgcaccaagcggagtaccgatggcaacaacgccacacacctcagcaatatggaaagcgtgcacaaccttgtgtacgctcagctgcagttcacctacgatacccttagaggctacatcaacagagccctggcccagatcgcagaggcatggtgcgtggaccagcggcggaccctggaggtgttcaaggagctctccaagatcaacccatccgccattctctccgccatctacaacaagcctattgccgctcggttcatgggcgatgtgctgggactggccagctgcgtgaccatcaaccaaacctcagtgaaggtgctcagagacatgaacgtcaaggagtctccaggcagatgttacagcagacctgtggtgatcttcaacttcgccaattcttcctacgtgcagtacggccaactgggtgaagacaacgagattctgttaggcaaccacaggactgaggagtgtcagctgccgagcctgaagatcttcatcgctggaaacagcgcatacgagtacgtggactacctcttcaagaggatgatcgacttgtcatctatctccacggttgattccatgatcgccttggacatcgatcctctggagaataccgacttcagagtgctggagctctacagccagaaggagcttaggtctagcaatgtgttcgacctggaggagatcatgagggagttcaatagctataagcagcatcaccaccaccatcac

SEQ ID NO: 192 - DNA, 2094 bp, Artificial Sequence
  Synthetic nucleotide sequence
atggagagcagaatctggtgcctcgtggtgtgcgtgaacctctgtatcgtctgcttaggagccgccgtgagcagtagctctaccagaggcacatccgccacccacagccaccactcttcacacaccaccagcgccgcccactccagatcaggcagcgtatcccagagagtgaccagcagccagaccgtgtcacatggagtgaatgaaacaatttacaacaccaccctcaagtacggcgacgtagtgggagtgaacactactaagtacccataccgcgtgtgtagcatggcccagggcaccgatctgatccgattcgagagaaacatcgtttgcaccagcatgaagcctatcaacgaggacctggatgagggcatcatggtggtgtacaagaggaacatcgtggcccacacgttcaaggttagggtgtaccagaaggtgctgactttccgaagaagctatgcctacattcacactacatacctgctcggcagtaacaccgagtacgtggcgccaccgatgtgggaaatacaccatattaattctcatagtcagtgctattccagctacagcagggtgatcgccggaaccgttttcgtggcttatcatagagattcctacgagaacaagaccatgcagctgatgccagacgactatagcaacacgcatagcacccgctacgtgaccgtgaaggaccagtggcattcaagaggatccacctggctctacagagagacatgcaatctgaactgcatggtgaccatcaccaccgcccggtccaagtacccttatcacttcttcgccacaagcaccggcgatgtggtggacatttccccattctacaacggaaccaaccggaacgcctcttacttcggcgagaacgccgacaagttcttcatcttcccaaattataccatcgtgagcgacttcggaagacctaacagcgccctggagacacacagactggtggccttcctcgagcgcgccgactccgtgatctcctgggacatccaggacgagaagaacgtgacttgtcagctgacattctgggaggccagcgaacggaccatcagaagcgaggctgaagactcctaccacttcagctccgccaagatgaccgccactttcctgtcaaagaagcaggaggtgaacatgagcgacagcgccttggattgcgtgagagatgaggccatcaacaagcttcaacagatcttcaacacatcctacaaccagacgtacgagaagtacggaaacgtgagcgtgttcgaaaccaccggcggcttagtggtgttctggcagggaatcaagcagaagtctctggtggagctggagagactggctaacagatcctctctaaacctgacacacaacagaaccaagcggagcacagacggcaataatgccacacacctgagcaacatggaaagcgtccacaacctcgtctatgcccaactgcagttcacctacgacaccctccgaggctacatcaacagagccctggcccagatcgccgaggcttggtgtgtggatcagagacggaccctggaggtgttcaaggagttgagcaagatcaacccgtccgccatcttgagcgctatatacaacaagccaattgctgcgcggttcatgggcgacgtgctgggcctcgcctcatgtgtgaccattaatcaaacaagcgtcaaggtcctgagggatatgaacgttaaggagagcccaggcaggtgctatagcagacctgtggtgattttcaacttcgccaacagcagctacgtgcagtacggccagctgggcgaggacaacgagatcctgctgggcaaccaccgcactgaggagtgccagctgccaagtctgaagatattcatcgcgggaaattcagcttacgagtatgtagactacctgttcaagagaatgatagatcttagcagcatctccactgtggacagtatgatagctcttgatattgacccactggagaataccgacttcagagtgttggagctgtacagtcagaaggagctcaggagctccaatgtgttcgacctggaggagatcatgagggaattcaatagctacaagcagcaccaccaccatcatcac

SEQ ID NO: 193 - DNA, 2094 bp, Artificial Sequence
  Synthetic nucleotide sequence
atggaatcccgaatctggtgcctcgttgtgtgcgtgaatttgtgcatcgtgtgtttgggcgccgccgtctcttcttcctccacacgtggtaccagcgcaacacactcccaccactcaagccacaccacgtccgcggcacacagcagaagcggcagtgtgagccaaagggtgaccagcagccagaccgtgagtcacggcgtgaacgagacaatctacaataccacactcaagtacggcgatgtggtgggcgtcaacaccaccaagtatccttacagagtctgttccatggcccagggcactgacctgatccggttcgaaagaaacatagtgtgcacctccatgaagcctatcaatgaggacctcgatgaaggcattatggtggtgtacaagaggaatattgtggcccataccttcaaggtgagagtgtaccagaaggtgctgaccttcagacggagctacgcctacatccatacaacctacctgctgggaagcaacaccgagtacgtggctcctccaatgtgggagatccaccacatcaatagccacagccagtgctactccagctacagcagagtgattgctggcaccgtcttcgtggcttaccacagagacagctatgagaacaagacaatgcagctcatgccagacgactactctaacacacattcaacccggtatgtgaccgtgaaggaccagtggcactcaagaggcagcacatggctctaccgagagacatgtaacctgaactgcatggttacaatcaccactgcaaggtctaagtacccatatcacttcttcgccacctctaccggagacgtggtggacatcagcccattctacaatggcaccaatcggaacgcaagctacttcggagagaacgccgacaagttcttcatcttcccgaactacaccatcgtgtccgatttcggcaggccaaacagcgccctggagacacaccggctggtggccttcctggagcgcgctgactccgttatctcttgggacatccaggatgagaagaatgtgacctgccaactgacattctgggaggcatccgagcggactatcagaagcgaggccgaggacagctaccacttcagcagcgctaagatgactgctaccttcctgtccaagaagcaggaggtgaacatgtctgattccgctctggactgcgtgagggacgaggctatcaacaagctccagcagatattcaatacttcctacaaccagacctacgagaagtacggtaacgtcagcgttttcgaaaccaccggcggcctggtcgtgttctggcagggaatcaagcagaagtcccttgtcgagctcgagagactggccaaccggtctagcctcaatctgacacacaataggaccaagagatctactgacggcaataacgccacacacctctccaacatggagagtgttcataacctggtttacgcccagctgcagttcacttacgataccctccgcggctacatcaacagggccctggcgcagatcgccgaggcctggtgcgtggatcaaagaaggaccctggaggtcttcaaggaactcagcaagatcaacccatctgctatcctgagcgccatctacaacaagccaatcgccgcccggttcatgggcgacgtcctgggcttggctagctgcgtgaccatcaatcagaccagcgtcaaggtgcttcgcgacatgaacgtcaaggagtcacctggccgctgttactcaaggccagtcgtgatcttcaatttcgccaatagctcctacgtgcagtacggacagttgggcgaggacaatgaaatactcctgggcaaccaccgcaccgaggagtgtcagctgccaagcctgaagatcttcatcgcgggaaactccgcttacgagtatgtggactacctgttcaagagaatgattgatctgagcagcatctccaccgtggacagcatgattgctctggatattgatcctctggagaacaccgatttccgcgtgctggagctgtacagccagaaggaattaaggagcagtaatgtgttcgacctggaggagatcatgagggagttcaacagttacaagcagcaccaccatcaccaccac

SEQ ID NO: 194 - DNA, 2094 bp, Artificial Sequence
  Synthetic nucleotide sequence
atggagtccagaatctggtgcttggtggtgtgcgtgaatctttgcattgtgtgcctcggcgccgccgtgagcagcagcagtactagaggtacctccgctacccacagccaccactcttcccatacaaccagcgccgcccactcacgtagcggctctgtgagccagagggtgacaagctcacagaccgtgagccacggcgtgaacgagactatctacaacactaccctgaagtacggcgatgtggtgggagtgaataccacaaagtacccgtacagggtgtgttccatggcccagggcaccgacctgattcgcttcgaaagaaacatcgtctgcaccagcatgaagcctatcaacgaggatttggatgagggtattatggtggtctacaagagaaatattgtggcccacaccttcaaggtcagagtgtaccagaaggtcctgacgttcaggagatcttacgcttacatccacaccacctaccttctgggctccaacaccgagtatgtggccccgcctatgtgggagatccaccacattaattcccactctcaatgctacagctcctattccagagtgatcgccggcacagtcttcgtggcctaccaccgggacagctatgagaacaagactatgcagctcatgccagacgactatagcaatactcatagcactagatatgtgactgtgaaggaccagtggcatagcagaggcagcacttggctgtaccgggaaacatgcaatcttaattgcatggtcaccataaccaccgcgagatccaagtacccttaccacttcttcgccacctccactggtgacgtcgtggacatctcccctttctataacggaacaaatagaaacgccagctacttcggtgagaacgccgacaagttcttcatcttccctaactacaccatagtgagcgatttcggcagaccgaactccgctctggagacacaccggctggtggccttcctggaacgggccgatagtgttatctcttgggatattcaagacgagaagaacgtcacctgtcagctgactttctgggaagccagcgagaggaccatcagaagtgaagctgaggatagctaccatttctctagtgccaagatgactgccaccttcctgtccaagaagcaggaggtcaacatgtccgacagcgccctcgactgtgtgagagacgaggctattaacaagctgcagcagattttcaacactagctacaatcagacatacgagaagtatggaaacgtgagcgtgttcgaaactaccggtggcctggtggtattctggcagggcatcaagcagaagtccctggtggaattggagagactggctaacaggtcgtccctgaacctgactcacaatagaacgaagaggagcacagacggcaataatgccacccatctgtccaatatggagagtgtgcacaatttggtgtatgcccagctgcagttcacctacgacaccctcaggggctacatcaacagagccctcgcccagatcgctgaagcctggtgcgtggatcagaggaggaccctggaggtcttcaaggaactgagcaagataaacccatccgccatcctcagtgccatttataacaagcctattgccgccaggttcatgggcgacgtgctgggcctggcttcctgtgtcacgattaatcagacctccgtgaaggtgctgagggacatgaacgtgaaggaaagccctggacggtgttacagccgaccagtagtgatcttcaacttcgccaactcctcatacgtgcagtatggccagctgggcgaggacaatgaaattctgctgggcaaccacaggaccgaagagtgccagctgcctagcctgaagatattcatcgccggtaatagcgcctacgagtacgtcgactatcttttcaagagaatgatcgatctgtctagcatttctaccgtggattccatgatcgctcttgacattgacccactggagaacacagacttcagggtgctcgagctgtattcccagaaggaactcaggtctagcaacgttttcgacctcgaggaaattatgagagagttcaactcgtacaagcaacaccatcaccaccatcac

SEQ ID NO: 195 - DNA, 2094 bp, Artificial Sequence
  Synthetic nucleotide sequence
atggagagccggatctggtgcctcgtggtgtgcgtgaacttatgcatcgtgtgcctcggcgccgccgtgagctctagctctacccggggcaccagcgccacccacagccaccacagcagccacaccacctcggccgctcacagccggagcggcagcgtgagccagcgggtgacctccagccagaccgtgtcccacggcgtgaacgagacgatctacaacaccaccctgaagtacggcgacgtggtgggagtgaacacgaccaagtacccctaccgggtgtgcagcatggcccagggcaccgacctgatccggttcgagcggaacattgtgtgcaccagcatgaagcccatcaacgaggacctggacgagggcatcatggtagtgtacaagagaaacatcgtggcccacaccttcaaggtgcgggtgtaccagaaggtgctgaccttccggcggagctacgcctacattcacacaacatacctgctgggcagcaacaccgagtacgtggctcctcccatgtgggagatccaccacatcaactctcatagccagtgctacagcagctacagccgggtgatcgccggcaccgtgttcgtggcctaccaccgggacagctacgagaacaagaccatgcagctgatgcccgacgactatagcaacacacactccactcggtacgtgaccgtgaaggaccagtggcacagcagaggcagcacctggctgtaccgggagacttgcaacctgaactgcatggtgaccatcaccaccgcccggtctaagtacccttaccacttcttcgccaccagcaccggcgatgtggtggacatcagccccttctacaacggcaccaaccggaacgccagctacttcggcgagaacgccgacaagttcttcatcttccccaactacaccatcgtgagcgacttcggccggcccaacagcgccctggaaactcaccggctggtggccttcctggagcgggccgacagcgtgatcagctgggacatccaggacgagaagaacgtgacctgccagctgacattctgggaggccagcgagcggaccatccggagcgaggccgaggatagctatcacttcagcagcgccaagatgaccgccaccttcctgagcaagaagcaggaggtgaacatgagcgattctgcactggactgcgtgcgggacgaggccatcaacaagctgcagcagatcttcaacaccagctacaaccagacctacgagaagtacggaaacgtgagcgtgttcgagactaccggcggccttgtcgtgttctggcagggaatcaagcagaagtccctggtcgagctcgagcgactggccaacagaagcagcctgaacctgacccacaaccggaccaagcggagcaccgacggcaacaacgccacacacctgtctaacatggagtctgtgcacaacctggtgtacgcccagctgcagttcacctacgacaccctgcggggctacatcaaccgggccctggcccagatcgccgaggcatggtgcgtggaccagcggcggaccctggaggtgttcaaggagctctctaagatcaacccgtctgccatcctgagcgccatttacaacaagcctatcgccgcaagattcatgggcgacgtcctgggcctggccagctgcgtgacgatcaatcagaccagcgtgaaggtcctgcgggacatgaacgtcaaggagagccccggcaggtgctatagccggcccgtggtgattttcaacttcgccaatagctcttacgtgcagtacggtcagttaggcgaggacaacgagatcttactgggcaaccaccggaccgaggagtgccaactcccgagcctcaagattttcattgccggcaatagcgcatacgaatatgtggactacctgttcaagcggatgatcgacctgagcagcatcagcaccgtggacagcatgattgctctggacatcgaccctctggagaacaccgacttccgggtgctggagctgtacagccagaaggagctgcggagctctaatgtgttcgacctggaggagatcatgcgggagttcaactcatataagcagcaccaccaccatcatcac

SEQ ID NO: 196 - DNA, 2094 bp, Artificial Sequence
  Synthetic nucleotide sequence
atggagagccggatctggtgcctcgtggtgtgcgtgaacctttgcatcgtgtgcttgggcgccgccgtgagcagcagctccacccggggcacctccgccacccactcccaccactcctcccacaccacctcagccgcccactctcgctccggctccgtctcccagcgcgtcacctccagccagaccgttagccacggcgtcaacgaaaccatctacaacaccaccctcaagtacggcgacgtcgtcggcgtaaacacaaccaagtacccctaccgcgtctgctccatggcccagggcaccgacctcatccgcttcgagcgcaacatcgtctgcacctccatgaagcccatcaacgaggacctcgacgagggcatcatggtcgtctacaagcgcaatattgtggcccacaccttcaaggtccgcgtctaccagaaggtcctcaccttccgccgctcctacgcctacatccacacaacctacctcctcggctccaacaccgagtacgtcgcccctcccatgtgggagatccaccacatcaacagccacagccagtgctactcctcctactcccgcgtcatcgccggcaccgtcttcgtcgcctaccaccgcgactcctacgagaacaagaccatgcagctcatgcccgacgactacagcaatacccacagcacccgctacgtcaccgtcaaggaccagtggcacagcagaggctccacctggctctaccgcgagacatgcaacctcaactgcatggtcaccatcaccaccgcccgctccaagtatccttaccacttcttcgccacctccaccggcgatgtcgtggacatctcaccattctacaacggcaccaaccgcaacgccagttacttcggcgagaacgccgacaagttcttcatcttccccaactacaccatcgtctccgacttcggccgccccaactccgccctcgagacacacagactggtggccttcctcgagcgcgccgactccgtcatctcctgggacatccaggacgagaagaacgtcacctgccagctcacattctgggaggcctccgagcgcaccatccgctccgaggccgaggactcataccatttctccagcgccaagatgaccgccaccttcctctccaagaagcaggaggtcaacatgagcgacagcgctctcgactgcgtccgcgacgaggccatcaacaagctccagcagatcttcaacacctcctacaaccagacgtacgagaagtatggaaacgtcagtgtcttcgaaaccacgggcggcctggttgtattctggcagggaataaagcagaagtccctcgtcgagcttgagcgcctcgccaaccgctcctccctcaacctcacccacaaccgcaccaagcgctccaccgacggcaacaacgctacccacctgtccaacatggagtccgtccacaacctcgtctacgcccagctccagttcacctacgacaccctccgcggctacatcaaccgcgccctcgcccagatcgccgaggcctggtgcgtcgaccagcgccgcaccctcgaggtcttcaaggagctgagtaagatcaaccctagcgcgatcctcagcgctatctataacaagccaatcgctgctaggttcatgggagacgtgctcggcctcgcctcctgcgtgaccatcaatcagacatccgtgaaggtgctgcgcgacatgaatgtcaaggagagcccaggccgctgttattcccggcccgtcgtcattttcaatttcgccaatagctcttacgtccagtacggccagctcggcgaggacaacgagatcctgctgggcaaccaccgcaccgaggagtgccagctgcctagcctcaagattttcattgccggcaattccgcttacgaatacgtggactacctcttcaagcgcatgatcgacctctcctccatctccaccgtcgactccatgatcgccctggatatcgaccctctcgagaacaccgacttccgcgtgttggagctctactcccagaaggagctcagatccagcaacgtattcgacctcgaggagatcatgcgcgagttcaactcctataagcagcaccaccaccatcatcac

SEQ ID NO: 197 - DNA, 2094 bp, Artificial Sequence
  Synthetic nucleotide sequence
atggagagccggatctggtgcttggtggtgtgcgtgaacttgtgcatcgtgtgcttgggcgccgccgtgagcagctctagcacccggggcaccagcgccacccacagccaccacagcagccacacgacctccgccgcccactcacggagcggcagcgtgagccagcgggtgaccagctcacagaccgtgtcccacggcgtgaacgagacgatctacaacaccaccctgaagtacggcgacgtggtgggcgtcaacactaccaagtacccctaccgggtgtgcagcatggcccagggcaccgacctgatccggttcgagcggaatattgtgtgtaccagcatgaagcccatcaacgaggacctggacgagggcatcatggtggtctacaagagaaacattgtggcccacaccttcaaggtgcgggtgtaccagaaggtgctgaccttccggcggagctacgcctacatccatacaacctacctgctgggcagcaacaccgagtacgtggcgcctcccatgtgggagatccaccacatcaactctcactcgcagtgctacagcagctacagccgggtgatcgccggcaccgtgttcgtggcctaccaccgggacagctacgagaacaagaccatgcagctgatgcccgacgactattctaacacccactccaccagatacgtgaccgtgaaggaccagtggcacagcaggggcagcacctggctgtaccgggagacttgcaacctgaactgcatggtgaccatcaccaccgcccggagtaagtatccatatcacttcttcgccaccagcacgggcgacgttgtggacatcagccccttctacaacggcaccaaccggaacgccagctacttcggcgagaacgccgacaagttcttcatcttccccaactacaccatcgtgagcgacttcggccggcccaacagcgccctggaaacccaccggctggtggccttcctggagcgggccgacagcgtgatcagctgggacatccaggacgagaagaacgtgacctgccagctgactttctgggaggccagcgagcggaccatccggagcgaggccgaagactcctaccacttcagcagcgccaagatgaccgccaccttcctgagcaagaagcaggaggtgaacatgagcgattcagctctggactgcgtgcgggacgaggccatcaacaagctgcagcagatcttcaacaccagctacaaccagacttacgagaagtatggaaacgtgagcgtgttcgagacaaccggcggcctcgtggtgttctggcagggtatcaagcagaagtctctcgtggagctggagagactggccaacagaagcagcctgaacctgacccacaaccggaccaagcggagcaccgacggcaacaacgctacccatctgtctaacatggagtcagtgcacaacctggtgtacgcccagctgcagttcacctacgacaccctgcggggctacatcaaccgggccctggcccagatcgccgaggcctggtgcgtggaccagcggcggaccctggaggtgttcaaggagctgtccaagatcaacccttccgccatcctgagcgccatttataataagccgatcgccgcccggttcatgggcgatgttctgggcctggccagctgcgtcaccattaatcagaccagcgttaaggtcctgcgggacatgaatgtcaaggagagccccggcaggtgctactcccgccccgtggtgatattcaacttcgccaactctagctacgtgcagtacggccaactaggcgaggacaacgagatcttgctcggtaaccaccggaccgaggagtgccagttaccttccctgaagattttcatcgcgggcaactccgcctacgagtatgtggactacctgttcaagcggatgatcgatctttctagcatcagcaccgtggacagcatgatagccctggacatcgacccactggagaacaccgacttccgggtgctggagctgtacagccagaaggagcttcggagcagcaatgtgttcgacctggaggagatcatgcgggagttcaattcttacaagcagcaccaccaccatcatcac

SEQ ID NO: 198 - DNA, 2094 bp, Artificial Sequence
  Synthetic nucleotide sequence
atggagagccggatctggtgcctcgtggtgtgcgtgaacctctgcatcgtgtgcctcggcgccgccgtgtcttcatcctccacccggggcacctccgccacccactcccaccactcctcccacaccactagtgccgcccactcacgctccggctccgtctcccagcgcgtcacctcatcccagacagtgagccacggcgtcaacgaaaccatctacaacaccaccctcaagtacggcgacgtcgtgggcgtgaacactacaaagtacccctaccgcgtctgctccatggcccagggcaccgacctgatccgcttcgagcgcaacatcgtctgcacctccatgaagcccatcaacgaggacctcgacgagggcatcatggtcgtctacaagaggaacattgtggcccacaccttcaaggtccgcgtctaccagaaggtcctcaccttccgccgctcctacgcctacatccacactacgtacctcctcggctccaacaccgagtacgtcgcccctcccatgtgggagatccaccacatcaactcgcacagccagtgctactcctcctactcccgcgtcatcgccggcaccgtcttcgtcgcctaccaccgcgactcctacgagaacaagaccatgcagctcatgcccgacgactatagcaacacacatagcacccgctacgtcaccgtcaaggaccagtggcatagcagaggctccacctggctctaccgcgagacgtgcaacctcaactgcatggtcaccatcaccaccgcccgcagcaagtatccatatcacttcttcgccacctccacaggagacgtggtcgacatctcgcctttctacaacggcaccaaccgcaacgctagctacttcggcgagaacgccgacaagttcttcatcttccccaactacaccatcgtctccgacttcggccgccccaactccgccctcgagactcaccgcttggtggccttcctcgagcgcgccgactccgtcatctcctgggacatccaggacgagaagaacgtcacctgccagctgaccttctgggaggcctccgagcgcaccatccgctccgaggccgaggacagctaccacttcagcagcgccaagatgaccgccaccttcctctccaagaagcaggaggtcaacatgagcgacagcgcccttgactgcgtccgcgacgaggccatcaacaagctccagcagatcttcaacacctcctacaaccagacttatgagaagtacggaaacgtctccgttttcgagacaacaggaggcctggttgtcttctggcagggcattaagcagaagtccctcgtcgagctggagagactcgccaaccgctcctccctcaacctcacccacaaccgcaccaagcgctccaccgacggcaacaatgctacacacctgagcaacatggagtccgtccacaacctcgtctacgcccagctccagttcacctacgacaccctccgcggctacatcaaccgcgccctcgcccagatcgccgaggcgtggtgcgtcgaccagcgccgcaccctcgaggtcttcaaggagctgtccaagatcaaccctagcgccatcctgtccgcaatctataacaagcctatcgcggctaggttcatgggcgatgtgctcggcctcgcctcctgcgtgactattaatcagaccagcgtcaaggtgctgcgcgacatgaacgtgaaggagagccctggccgctgctattccaggcccgtcgtcatcttcaatttcgccaattccagctatgtccagtacggccagctcggcgaggacaacgagatcctgcttggcaaccaccgcaccgaggagtgtcagctccctagcctgaagattttcattgccggcaatagcgcttatgagtatgtggactacctcttcaagcgcatgatcgacctctcctccatctccaccgtcgactccatgatcgccctggacatcgacccactggagaacaccgacttccgcgtgctcgaactctactcccagaaggaactgagatcaagcaacgtgttcgacctcgaggagatcatgcgcgagttcaactcttataagcagcaccaccaccatcatcac

SEQ ID NO: 199 - DNA, 642 bp, Artificial Sequence
  Synthetic nucleotide sequence
atgctcagacttctcctcagacaccacttccactgcctcttgctttgtgccgtctgggccacaccttgcctcgccagcccttggagcaccttgacagccaaccagaacccttcccctccttggtcaaagttgacctacagcaagcctcacgacgctgctaccttctactgtccattcctgtaccctagccctccaagatctccgctgcagttcagcggcttccagagggtgtctaccggacctgagtgcaggaatgagacgctgtacctgctgtacaacagagagggccagaccctggtggaaagaagctccacctgggtcaagaaggtaatctggtacctgagcggcagaaaccagacaatactccagagaatgccacggaccgctagcaagcctagcgatggaaacgtgcagattagcgtggaggacgcaaagattttcggcgcccacatggtgccaaagcagacaaagctgctgcggttcgtggtcaacgacggcacccggtaccagatgtgcgtgatgaagctggagagctgggctcacgtgttcagagattactctgtgagcttccaagtgcggctcaccttcaccgaagccaacaatcagacctacactttctgtactcaccctaacctgatcgtg

SEQ ID NO: 200 - DNA, 642 bp, Artificial Sequence
  Synthetic nucleotide sequence
atgcttagactcctcctcagacaccacttccattgtctccttttgtgcgccgtgtgggccaccccttgccttgcatcaccttggtctaccctcaccgccaaccagaaccctagccctccttggagtaagttaacatactctaagccgcacgacgccgccaccttctactgtcctttcctctacccaagcccacctcgtagcccacttcagttctctggattccagagagtttcaacaggccctgagtgtcggaacgagactctgtacctgttgtataacagagagggacagaccctggtggagcggtcctccacctgggtgaagaaggtgatctggtatctgagcggcagaaaccagaccatcctgcagcggatgccaaggaccgctagcaagccaagcgacggcaatgtgcagattagcgtggaggatgctaagattttcggcgcacacatggttcctaagcagaccaagctgttacggttcgtggtgaacgatggaactcggtaccaaatgtgcgtgatgaagctggagtcatgggcacatgtgttccgtgactactctgtttctttccaggtgcgcctgaccttcaccgaggccaataaccagacatacaccttctgtacgcacccaaatctgatcgta

SEQ ID NO: 201 - DNA, 642 bp, Artificial Sequence
  Synthetic nucleotide sequence
atgctcagacttttgctcagacaccacttccactgtttgttgttatgtgccgtgtgggctaccccttgcctcgcatctccgtggtccacactcacagccaaccagaatccttctcctccttggagcaagctcacatatagcaagcctcacgacgcggcaaccttctactgcccattcctgtatccttctcctccgcggagccctctgcagttctccggattccagagagtgtccaccggtcctgagtgcagaaatgaaacactgtatcttctctacaacagagagggccagacccttgtggagagaagcagcacctgggtgaagaaggtcatttggtatctgtctggcagaaaccagaccatactgcagcggatgccaagaacagcctccaagccatccgacggtaacgtgcagatctccgtggaggacgccaagattttcggcgcccacatggtgccaaagcagaccaagctgctgagattcgtggtgaacgatggcaccaggtaccagatgtgcgttatgaagcttgagtcctgggctcacgtgttcagagactactctgtgagcttccaggtgagactgacattcacagaggccaacaaccagacttacaccttctgcacgcatcctaatctgatcgtg

SEQ ID NO: 202 - DNA, 642 bp, Artificial Sequence
  Synthetic nucleotide sequence
atgctcagacttcttctcagacaccacttccactgtttgcttctctgcgcagtgtgggcaaccccttgccttgcttccccttggtcgactctcaccgccaaccagaatccaagccctccttggagcaagctcacttacagcaagccgcacgacgccgccaccttctactgtcctttcctgtaccctagccctccaagatctcctctgcaattctctggattccagagagtgagcaccggcccagagtgccggaacgagactctgtatctgctgtacaatagggagggacaaaccctggtggagaggagcagcacatgggtgaagaaggtgatctggtacctgagcggcagaaaccagaccatcctgcagagaatgccacggaccgccagcaagccaagcgatggcaacgtccagattagcgtggaagacgccaagatcttcggagcccacatggtgcctaagcagaccaagcttctgcgattcgtggtgaacgacggtacccgctaccaaatgtgcgtgatgaagctggagtcatgggcccacgtcttccgcgactacagcgtatccttccaggtgaggcttaccttcaccgaggccaacaaccaaacctacacattctgcacccatccaaatttgattgtg

SEQ ID NO: 203 - DNA, 642 bp, Artificial Sequence
  Synthetic nucleotide sequence
atgctcagactattgttgagacatcacttccattgcctccttttgtgcgccgtgtgggctaccccttgcctcgcctcaccttggagcaccttgaccgccaaccagaacccgagccctccgtggtcaaagctcacctacagcaagcctcacgacgccgcaaccttctattgtccattcctgtacccttctccgccgaggtcccctcttcagttcagcggattccagagagtgtctaccggaccagaatgcagaaacgaaacactgtatctgctgtacaaccgggagggccagaccctggtcgagcggagctctacctgggtcaagaaggttatatggtatctgagcggcaggaaccagaccatcctgcagcgcatgcctagaaccgctagcaagccaagcgacggcaacgttcagatctccgtggaggacgctaagatcttcggcgcccatatggtgccaaagcagactaagctgctgagattcgtggtaaacgacggcacaagatatcagatgtgcgtgatgaagctggagagctgggctcatgtgttcagggactactccgtgagtttccaggtgaggctgacattcaccgaggctaataatcagacctacaccttctgcactcacccaaatctgatcgtg

SEQ ID NO: 204 - DNA, 642 bp, Artificial Sequence
  Synthetic nucleotide sequence
atgctcagattattgctcagacaccacttccactgcctcctcttgtgcgccgtgtgggcgacaccgtgtctcgcaagcccttggtccacactaacggccaaccagaaccctagccctccttggagcaagctcacttatagcaagccacacgatgcggccactttctactgtcctttcctgtatccatcccctcctagatctcctctgcagttcagcggattccagagagtatctactggccctgagtgcagaaatgaaaccctctatctcctgtacaatcgggagggccagactttggtggagcgcagctccacctgggtgaagaaggtgatctggtacctgagcggcagaaaccagaccatcctacagaggatgccaaggaccgccagcaagccatctgacggcaacgtgcagatctctgtggaggacgccaagatcttcggagcccatatggtgcctaagcagacaaagctgttgaggttcgtcgtgaatgacggcacaagataccagatgtgtgtgatgaagctggagagctgggctcacgtgttccgagactacagcgtctcgttccaggtgagactgacattcaccgaggcaaacaaccagacctacaccttctgtacgcaccctaacctgatcgtt

SEQ ID NO: 205 - DNA, 642 bp, Artificial Sequence
  Synthetic nucleotide sequence
atgcttcggctcctccttcggcaccacttccactgcctcctcctctgcgccgtgtgggccacaccttgcctcgccagcccctggagcaccctcaccgccaaccagaaccccagccctccgtggtctaagttaacctacagcaagccccacgacgccgccaccttctactgccccttcctgtacccttcaccgccgcggagcccgctgcagttcagcggcttccagcgggtgagcaccggccccgagtgccggaacgagacgctgtacctgctgtacaaccgggagggccagaccctggtggagcggagcagcacctgggtgaagaaggtgatctggtacctgagcggccggaaccagaccatcctgcagcggatgccccggaccgcctcaaagccaagcgacggcaacgtgcagatcagcgtggaggacgccaagatcttcggcgcccacatggtgcccaagcagaccaagttgctgcgcttcgtggtgaacgacggcacccggtaccagatgtgcgtgatgaagctggagagctgggcccacgtgttccgggactacagcgtgagcttccaggtgcggctgacattcaccgaggccaacaatcagacctacaccttctgcacccaccccaacctgatcgtg

SEQ ID NO: 206 - DNA, 642 bp, Artificial Sequence
  Synthetic nucleotide sequence
atgttacggctccttctccgccaccacttccactgcctcttactctgcgccgtgtgggccactccatgccttgccagcccctggagcaccttgaccgccaaccagaaccccagcccaccttggagtaagctcacctacagcaagccccacgacgccgccaccttctactgccccttcctgtatccgagcccaccgcggagcccgctgcagttcagcggcttccagcgggtgagcaccggccccgagtgccggaacgaaaccctgtacctgctgtacaaccgggagggccagaccctggtggagcggagcagcacctgggtgaagaaggtgatctggtacctgagcggccggaaccagaccatcctgcagcggatgccccggaccgctagtaagcctagcgacggcaacgtgcagatcagcgtggaggacgccaagatcttcggcgcccacatggtgcccaagcagaccaagctgcttaggttcgtggtgaacgacggcacccggtaccagatgtgcgtgatgaagctggagagctgggcccacgtgttccgggactacagcgtgagcttccaggtgcggctgaccttcaccgaggccaacaaccagacatacaccttctgcacccaccccaacctgatcgtg

SEQ ID NO: 207 - DNA, 642 bp, Artificial Sequence
  Synthetic nucleotide sequence
atgctacggctcctactccgccaccacttccactgcttacttttgtgcgccgtgtgggccacaccatgcttggccagcccctggagcaccctcaccgccaaccagaacccctcacctccctggtccaagctcacctactccaagccccacgacgccgccaccttctactgccccttcctctatccatctcctccacgcagcccactccagttctccggcttccagcgcgtctccaccggccccgagtgccgcaacgagacgctctacctcctctacaaccgcgagggccagaccctcgtcgagaggtcatccacctgggtcaagaaggtcatctggtacctctccggccgcaaccagaccatcctccagcgcatgccccgcaccgcgtctaagccgtccgacggcaacgtccagatctccgtcgaggacgccaagatcttcggcgcccacatggtccccaagcagaccaagctcctccgcttcgtcgtcaacgacggcacccgctaccagatgtgcgtcatgaagctcgagtcctgggcccacgtcttccgcgactactccgtctccttccaggtccgcctcaccttcaccgaggccaataaccagacttacaccttctgcacccaccccaacctcatcgtc

SEQ ID NO: 208 - DNA, 642 bp, Artificial Sequence; identical to SEQ ID NO: 207
  Synthetic nucleotide sequence

SEQ ID NO: 209 - DNA, 642 bp, Artificial Sequence
  Synthetic nucleotide sequence
atgcttcggctcctcctaaggcaccacttccactgccttttgctttgcgccgtgtgggccaccccttgcttggccagcccctggagcaccctcaccgccaaccagaacccctcccctccctggtccaagctcacctactccaagccccacgacgccgccaccttctactgccccttcctctacccgtcccctccacgcagcccactccagttctccggcttccagcgcgtctccaccggccccgagtgccgcaacgaaacactctacctcctctacaaccgcgagggccagaccctcgtcgagcgctcctccacctgggtcaagaaggtcatctggtacctctccggccgcaaccagaccatcctccagcgcatgccccgcaccgcaagcaagccatccgacggcaacgtccagatctccgtcgaggacgccaagatcttcggcgcccacatggtccccaagcagaccaagctcctccgcttcgtcgtcaacgacggcacccgctaccagatgtgcgtcatgaagctcgagtcctgggcccacgtcttccgcgactactccgtctccttccaggtccgcctcaccttcaccgaggccaataatcagacatacaccttctgcacccaccccaacctcatcgtc

SEQ ID NO: 210 - DNA, 387 bp, Artificial Sequence
  Synthetic nucleotide sequence
atgcggctgtgtcgggtgtggctgtctgtttgtctgtgcgccgtggtgctgggtcagtgccagcgggaaaccgcggaaaagaacgattattaccgagtaccgcattactgggacgcgtgctctcgcgcgctgcccgaccaaacccgttacaagtatgtggaacagctcgtggacctcacgttgaactaccactacgatgcgagccacggcttggacaactttgacgtgctcaagagaatcaacgtgaccgaggtgtcgttgctcatcagcgactttagacgtcagaaccgtcgcggcggcaccaacaaaaggaccacgttcaacgccgccggttcgctggcgccacacgcccggagcctcgagttcagcgtgcggctctttgccaac

SEQ ID NO: 211 - protein, 742 aa, Artificial Sequence
  Synthetic amino acid sequence
MRPGLPSYLIILAVCLFSHLLSSRYGAEAVSEPLDKAFHLLLNTYGRPIRFLRENTTQCTYNSSLRNSTVVRENAISFNFFQSYNQYYVFHMPRCLFAGPLAEQFLNQVDLTETLERYQQRLNTYALVSKDLASYRSFSQQLKAQDSLGEQPTTVPPPIDLSIPHVWMPPQTTPHGWTESHTTSGLHRPHFNQTCILFDGHDLLFSTVTPCLHQGFYLIDELRYVKITLTEDFFVVTVSIDDDTPMLLIFGHLPRVLFKAPYQRDNFILRQTEKHELLVLVKKDQLNRHSYLKDPDFLDAALDFNYLDLSALLRNSFHRYAVDVLKSGRCQMLDRRTVEMAFAYALALFAAARQEEAGAQVSVPRALDRQAALLQIQEFMITCLSQTPPRTTLLLYPTAVDLAKRALWTPNQITDITSLVRLVYILSKQNQQHLIPQWALRQIADFALKLHKTHLASFLSAFARQELYLMGSLVHSMLVHTTERREIFIVETGLCSLAELSHFTQLLAHPHHEYLSDLYTPCSSSGRRDHSLERLTRLFPDATVPATVPAALSILSTMQPSTLETFPDLFCLPLGESFSALTVSEHVSYIVTNQYLIKGISYPVSTTVVGQSLIITQTDSQTKCELTRNMHTTHSITVALNISLENCAFCQSALLEYDDTQGVINIMYMHDSDDVLFALDPYNEVVVSSPRTHYLMLLKNGTVLEVTDVVVDATDSRLLMMSVYALSAIIGIYLLYRMLKTC

SEQ ID NO: 212 - protein, 278 aa, Artificial Sequence
  Synthetic amino acid sequence
MCRRPDCGFSFSPGPVILLWCCLLLPIVSSAAVSVAPTAAEKVPAECPELTRRCLLGEVFEGDKYESWLRPLVNVTGRDGPLSQLIRYRPVTPEAANSVLLDEAFLDTLALLYNNPDQLRALLTLLSSDTAPRWMTVMRGYSECGDGSPAVYTCVDDLCRGYDLTRLSYGRSIFTEHVLGFELVPPSLFNVVVAIRNEATRTNRAVRLPVSTAAAPEGITLFYGLYNAVKEFCLRHQLDPPLLRHLDKYYAGLPPELKQTRVNLPAHSRYGPQAVDAR

SEQ ID NO: 213 - protein, 171 aa, Artificial Sequence
  Synthetic amino acid sequence
MSPKDLTPFLTALWLLLGHSRVPRVRAEECCEFINVNHPPERCYDFKMCNRFTVALRCPDGEVCYSPEKTAEIRGIVTTMTHSLTRQVVHNKLTSCNYNPLYLEADGRIRCGKVNDKAQYLLGAAGSVPYRWINLEYDKITRIVGLDQYLESVKKHKRLDVCRAKMGYMLQ

SEQ ID NO: 214 - protein, 214 aa, Artificial Sequence
  Synthetic amino acid sequence
MLRLLLRHHFHCLLLCAVWATPCLASPWSTLTANQNPSPPWSKLTYSKPHDAATFYCPFLYPSPPRSPLQFSGFQRVSTGPECRNETLYLLYNREGQTLVERSSTWVKKVIWYLSGRNQTILQRMPRTASKPSDGNVQISVEDAKIFGAHMVPKQTKLLRFVVNDGTRYQMCVMKLESWAHVFRDYSVSFQVRLTFTEANNQTYTFCTHPNLIV

SEQ ID NO: 215 - protein, 129 aa, Artificial Sequence
  Synthetic amino acid sequence
MRLCRVWLSVCLCAVVLGQCQRETAEKNDYYRVPHYWDACSRALPDQTRYKYVEQLVDLTLNYHYDASHGLDNFDVLKRINVTEVSLLISDFRRQNRRGGTNKRTTFNAAGSLAPHARSLEFSVRLFAN

SEQ ID NO: 216 - protein, 907 aa, Artificial Sequence; identical to SEQ ID NO: 46
  Synthetic amino acid sequence

SEQ ID NO: 217 - protein, 557 aa, Artificial Sequence
  Synthetic amino acid sequence
MESRGRRCPEMISVLGPISGHVLKAVFSRGDTPVLPHETRLLQTGIHVRVSQPSLILVSQYTPDSTPCHRGDNQLQVQHTYFTGSEVENVSVNVHNPTGRSICPSQEPMSIYVYALPLKMLNIPSINVHHYPSAAERKHRHLPVADAVIHASGKQMWQARLTVSGLAWTRQQNQWKEPDVYYTSAFVFPTKDVALRHVVCAHELVCSMENTRATKMQVIGDQYVKVYLESFCEDVPSGKLFMHVTLGSDVEEDLTMTRNPQPFMRPHERNGFTVLCPKNMIIKPGKISHIMLDVAFTSHEHFGLLCPKSIPGLSISGNLLMNGQQIFLEVQAIRETVELRQYDPVAALFFFDIDLLLQRGPQYSEHPTFTSQYRIQGKLEYRHTWDRHDEGAAQGDDDVWTSGSDSDEELVTTERKTPRVTGGGAMASASTSAGSASSATACTAGVMTRGRLKAESTVAPEEDTDEDSDNEIHNPAVFTWPPWQAGILARNLVPMVATVQGQNLKYQEFFWDANDIYRIFAELEGVWQPAAQPKRRRHRQDALPGPCIASTPKKHRG

SEQ ID NO: 218 - protein, 900 aa, Artificial Sequence
  Synthetic amino acid sequence
MESRGRRCPEMISVLGPISGHVLKAVFSRGDTPVLPHETRLLQTGIHVRVSQPSLILVSQYTPDSTPCHRGDNQLQVQHTYFTGSEVENVSVNVHNPTGRSICPSQEPMSIYVYALPLKMLNIPSINVHHYPSAAERKHRHLPVADAVIHASGKQMWQARLTVSGLAWTRQQNQWKEPDVYYTSAFVFPTKDVALRHVVCAHELVCSMENTRATKMQVIGDQYVKVYLESFCEDVPSGKLFMHVTLGSDVEEDLTMTRNPQPFMRPHERNGFTVLCPKNMIIKPGKISHIMLDVAFTSHEHFGLLCPKSIPGLSISGNLLMNGQQIFLEVQAIRETVELRQYDPVAALFFFDIDLLLQRGPQYSEHPTFTSQYRIQGKLEYRHTWDRHDEGAAQGDDDVWTSGSDSDEELVTTERKTPRVTGGGAMASASTSAGRKRKSASSATACTAGVMTRGRLKAESTVAPEEDTDEDSDNEIHNPAVFTWPPWQAGILARNLVPMVATVQGQNLKYQEFFWDANDIYRIFAELEGVWQPAAQPKRRRHRQDALPGPCIASTPKKHRGESSAKRKMDPDNPDEGPSSKVPRPETPVTKATTFLQTMLRKEVNSQLSLGDPLFPELAEESLKTFEQVTEDCNENPEKDVLTELVKQIKVRVDMVRHRIKEHMLKKYTQTEEKFTGAFNMMGGCLQNALDILDKVHEPFEDMKCIGLTMQSMYENYIVPEDKREMWMACIKELHDVSKGAANKLGGALQAKARAKKDELRRKMMYMCYRNIEFFTKNSAFPKTTNGCSQAMAALQNLPQCSPDEIMSYAQKIFKILDEERDKVLTHIDHIFMDILTTCVETMCNEYKVTSDACMMTMYGGISLLSEFCRVLCCYVLEETSVMLAKRPLITKPEVISVMK

SEQ ID NO: 219 - protein, 1047 aa, Artificial Sequence
  Synthetic amino acid sequence
MESRGRRCPEMISVLGPISGHVLKAVFSRGDTPVLPHETRLLQTGIHVRVSQPSLILVSQYTPDSTPCHRGDNQLQVQHTYFTGSEVENVSVNVHNPTGRSICPSQEPMSIYVYALPLKMLNIPSINVHHYPSAAERKHRHLPVADAVIHASGKQMWQARLTVSGLAWTRQQNQWKEPDVYYTSAFVFPTKDVALRHVVCAHELVCSMENTRATKMQVIGDQYVKVYLESFCEDVPSGKLFMHVTLGSDVEEDLTMTRNPQPFMRPHERNGFTVLCPKNMIIKPGKISHIMLDVAFTSHEHFGLLCPKSIPGLSISGNLLMNGQQIFLEVQAIRETVELRQYDPVAALFFFDIDLLLQRGPQYSEHPTFTSQYRIQGKLEYRHTWDRHDEGAAQGDDDVWTSGSDSDEELVTTERKTPRVTGGGAMASASTSAGSASSATACTAGVMTRGRLKAESTVAPEEDTDEDSDNEIHNPAVFTWPPWQAGILARNLVPMVATVQGQNLKYQEFFWDANDIYRIFAELEGVWQPAAQPKRRRHRQDALPGPCIASTPKKHRGESSAKRKMDPDNPDEGPSSKVPRPETPVTKATTFLQTMLRKEVNSQLSLGDPLFPELAEESLKTFEQVTEDCNENPEKDVLTELVKQIKVRVDMVRHRIKEHMLKKYTQTEEKFTGAFNMMGGCLQNALDILDKVHEPFEDMKCIGLTMQSMYENYIVPEDKREMWMACIKELHDVSKGAANKLGGALQAKARAKKDELRRKMMYMCYRNIEFFTKNSAFPKTTNGCSQAMAALQNLPQCSPDEIMSYAQKIFKILDEERDKVLTHIDHIFMDILTTCVETMCNEYKVTSDACMMTMYGGISLLSEFCRVLCCYVLEETSVMLAKRPLITKPEVISVMKRRIEEICMKVFAQYILGADPLRVCSPSVDDLRAIAEESDEEEAIVAYTLATAGASSSDSLVSPPESPVPATIPLSSVIVAENSDQEESEQSDEEQEEGAQEEREDTVSVKSEPVSEIEEVASEEEEDGAEEPTASGGKSTHPMVTRSKADQ

SEQ ID NO: 220 - protein, 491 aa, Artificial Sequence
  Synthetic amino acid sequence
MESSAKRKMDPDNPDEGPSSKVPRPETPVTKATTFLQTMLRKEVNSQLSLGDPLFPELAEESLKTFEQVTEDCNENPEKDVLTELVKQIKVRVDMVRHRIKEHMLKKYTQTEEKFTGAFNMMGGCLQNALDILDKVHEPFEDMKCIGLTMQSMYENYIVPEDKREMWMACIKELHDVSKGAANKLGGALQAKARAKKDELRRKMMYMCYRNIEFFTKNSAFPKTTNGCSQAMAALQNLPQCSPDEIMSYAQKIFKILDEERDKVLTHIDHIFMDILTTCVETMCNEYKVTSDACMMTMYGGISLLSEFCRVLCCYVLEETSVMLAKRPLITKPEVISVMKRRIEEICMKVFAQYILGADPLRVCSPSVDDLRAIAEESDEEEAIVAYTLATAGASSSDSLVSPPESPVPATIPLSSVIVAENSDQEESEQSDEEQEEGAQEEREDTVSVKSEPVSEIEEVASEEEEDGAEEPTASGGKSTHPMVTRSKADQ

SEQ ID NO: 221 - protein, 580 aa, Artificial Sequence
  Synthetic amino acid sequence
MESSAKRKMDPDNPDEGPSSKVPRPETPVTKATTFLQTMLRKEVNSQLSLGDPLFPELAEESLKTFEQVTEDCNENPEKDVLTELGDILAQAVNHAGIDSSSTGPTLTTHSCSVSSAPLNKPTPTSVAVTNTPLPGASATPELSPRKKPRKTTRPFKVIIKPPVPPAPIMLPLIKQEDIKPEPDFTIQYRNKIIDTAGCIVISDSEEEQGEEVETRGATASSPSTGSGTPRVTSPTHPLSQMNHPPLPDPLGRPDEDSSSSSSSSCSSASDSESESEEMKCSSGGGASVTSSHHGRGGFGGAASSSLLSCGHQSSGGASTGPRKKKSKRISELDNEKVRNIMKDKNTPFCTPNVQTRRGRVKIDEVSRMFRHTNRSLEYKNLPFMIPSMHQVLEEAIKVCKTMQVNNKGIQIIYTRNHEVKNEVDQVRCRLGSMCNLALSTPFLMEHTMPVTHPPDVAQRTADACNDGVKAVWNLKELHTHQLCPRSSDYRNMIIHAATPVDLLGALNLCLPLMQKFPKQVMVRIFSTNQGGFMLPIYETAAKAYAVGQFEKPTETPPEDLDTLSLAIEAAIQDLRNKSQ

SEQ ID NO: 222 - protein, 561 aa, Artificial Sequence
  Synthetic amino acid sequence
MESRGRRCPEMISVLGPISGHVLKAVFSRGDTPVLPHETRLLQTGIHVRVSQPSLILVSQYTPDSTPCHRGDNQLQVQHTYFTGSEVENVSVNVHNPTGRSICPSQEPMSIYVYALPLKMLNIPSINVHHYPSAAERKHRHLPVADAVIHASGKQMWQARLTVSGLAWTRQQNQWKEPDVYYTSAFVFPTKDVALRHVVCAHELVCSMENTRATKMQVIGDQYVKVYLESFCEDVPSGKLFMHVTLGSDVEEDLTMTRNPQPFMRPHERNGFTVLCPKNMIIKPGKISHIMLDVAFTSHEHFGLLCPKSIPGLSISGNLLMNGQQIFLEVQAIRETVELRQYDPVAALFFFDIDLLLQRGPQYSEHPTFTSQYRIQGKLEYRHTWDRHDEGAAQGDDDVWTSGSDSDEELVTTERKTPRVTGGGAMASASTSAGRKRKSASSATACTAGVMTRGRLKAESTVAPEEDTDEDSDNEIHNPAVFTWPPWQAGILARNLVPMVATVQGQNLKYQEFFWDANDIYRIFAELEGVWQPAAQPKRRRHRQDALPGPCIASTPKKHRG

SEQ ID NO: 223 - protein, 698 aa, Artificial Sequence
  Synthetic amino acid sequence
MESRIWCLVVCVNLCIVCLGAAVSSSSTRGTSATHSHHSSHTTSAAHSRSGSVSQRVTSSQTVSHGVNETIYNTTLKYGDVVGVNTTKYPYRVCSMAQGTDLIRFERNIVCTSMKPINEDLDEGIMVVYKRNIVAHTFKVRVYQKVLTFRRSYAYIHTTYLLGSNTEYVAPPMWEIHHINSHSQCYSSYSRVIAGTVFVAYHRDSYENKTMQLMPDDYSNTHSTRYVTVKDQWHSRGSTWLYRETCNLNCMVTITTARSKYPYHFFATSTGDVVDISPFYNGTNRNASYFGENADKFFIFPNYTIVSDFGRPNSALETHRLVAFLERADSVISWDIQDEKNVTCQLTFWEASERTIRSEAEDSYHFSSAKMTATFLSKKQEVNMSDSALDCVRDEAINKLQQIFNTSYNQTYEKYGNVSVFETTGGLVVFWQGIKQKSLVELERLANRSSLNLTHNRTKRSTDGNNATHLSNMESVHNLVYAQLQFTYDTLRGYINRALAQIAEAWCVDQRRTLEVFKELSKINPSAILSAIYNKPIAARFMGDVLGLASCVTINQTSVKVLRDMNVKESPGRCYSRPVVIFNFANSSYVQYGQLGEDNEILLGNHRTEECQLPSLKIFIAGNSAYEYVDYLFKRMIDLSSISTVDSMIALDIDPLENTDFRVLELYSQKELRSSNVFDLEEIMREFNSYKQHHHHHH

SEQ ID NO: 224 - protein, 742 aa, Artificial Sequence; identical to SEQ ID NO: 211
  Synthetic amino acid sequence

SEQ ID NO: 225 - DNA, 2464 bp, Artificial Sequence
  Synthetic nucleotide sequence
tcaagcttttggaccctcgtacagaagctaatacgactcactatagggaaataagagagaaaagaagagtaagaagaaatataagagccaccatgcggccaggcctcccctcctacctcatcatcctcgccgtctgtctcttcagccacctactttcgtcacgatatggcgcagaagccgtatccgaaccgctggacaaagcgtttcacctactgctcaacacctacgggagacccatccgcttcctgcgtgaaaataccacccagtgtacctacaacagcagcctccgtaacagcacggtcgtcagggaaaacgccatcagtttcaactttttccaaagctataatcaatactatgtattccatatgcctcgatgtctttttgcgggtcctctggcggagcagtttctgaaccaggtagatctgaccgaaaccctggaaagataccaacagagacttaacacttacgcgctggtatccaaagacctggccagctaccgatctttttcgcagcagctaaaggcacaagacagcctaggtgaacagcccaccactgtgccaccgcccattgacctgtcaatacctcacgtttggatgccaccgcaaaccactccacacggctggacagaatcacataccacctcaggactacaccgaccacactttaaccagacctgtatcctctttgatggacacgatctactattcagcaccgtcacaccttgtttgcaccaaggcttttacctcatcgacgaactacgttacgttaaaataacactgaccgaggacttcttcgtagttacggtgtccatagacgacgacacacccatgctgcttatcttcggccatcttccacgcgtacttttcaaagcgccctatcaacgcgacaactttatactacgacaaactgaaaaacacgagctcctggtgctagttaagaaagatcaactgaaccgtcactcttatctcaaagacccggactttcttgacgccgcacttgacttcaactacctagacctcagcgcactactacgtaacagctttcaccgttacgccgtggatgtactcaagagcggtcgatgtcagatgctggaccgccgcacggtagaaatggccttcgcctacgcattagcactgttcgcagcagcccgacaagaagaggccggcgcccaagtctccgtcccacgggccctagaccgccaggccgcactcttacaaatacaagaatttatgatcacctgcctctcacaaacaccaccacgcaccacgttgctgctgtatcccacggccgtggacctggccaaacgagccctttggacaccgaatcagatcaccgacatcaccagcctcgtacgcctggtctacatactctctaaacagaatcagcaacatctcatcccccaatgggcactacgacagatcgccgactttgccctaaaactacacaaaacgcacctggcctcttttctttcagccttcgcacgccaagaactctacctcatgggcagcctcgtccactccatgctggtacatacgacggagagacgcgaaatcttcatcgtagaaacgggcctctgttcattggccgagctatcacactttacgcagttgttagctcatccacaccacgaatacctcagcgacctgtacacaccctgttccagtagcgggcgacgcgatcactcgctcgaacgcctcacgcgtctcttccccgatgccaccgtccccgctaccgttcccgccgccctctccatcctatctaccatgcaaccaagcacgctggaaaccttccccgacctgttttgcttgccgctcggcgaatccttctccgcgctgaccgtctccgaacacgtcagttatatcgtaacaaaccagtacctgatcaaaggtatctcctaccctgtctccaccaccgtcgtaggccagagcctcatcatcacccagacggacagtcaaactaaatgcgaactgacgcgcaacatgcataccacacacagcatcacagtggcgctcaacatttcgctagaaaactgcgccttttgccaaagcgccctgctagaatacgacgacacgcaaggcgtcatcaacatcatgtacatgcacgactcggacgacgtccttttcgccctggatccctacaacgaagtggtggtctcatctccgcgaactcactacctcatgcttttgaaaaacggtacggtactagaagtaactgacgtcgtcgtggacgccaccgacagtcgtctcctcatgatgtccgtctacgcgctatcggccatcatcggcatctatctgctctaccgcatgctcaagacatgcgattacaaggacgatgacgataagtgatgataataggctggagcctcggtggccatgcttcttgccccttgggcctccccccagcccctcctccccttcctgcacccgtacccccgtggtctttgaataaagtctgagtgggcggc

SEQ ID NO: 226 - DNA, 1045 bp, Artificial Sequence; identical to SEQ ID NO: 142
  Synthetic nucleotide sequence

SEQ ID NO: 227 - DNA, 1072 bp, Artificial Sequence
  Synthetic nucleotide sequence
tcaagcttttggaccctcgtacagaagctaatacgactcactatagggaaataagagagaaaagaagagtaagaagaaatataagagccaccatgtgccgccgcccggattgcggcttctctttctcacctggaccggtgatactgctgtggtgttgccttctgctgcccattgtttcctcagccgccgtcagcgtcgctcctaccgccgccgagaaagtccccgcggagtgccccgaactaacgcgccgatgcttgttgggtgaggtgtttgagggtgacaagtatgaaagttggctgcgcccgttggtgaatgttaccgggcgcgatggcccgctatcgcaacttatccgttaccgtcccgttacgccggaggccgccaactccgtgctgttggacgaggctttcctggacactctggccctgctgtacaacaatccggatcaattgcgggccctgctgacgctgttgagctcggacacagcgccgcgctggatgacggtgatgcgcggctacagcgagtgcggcgatggctcgccggccgtgtacacgtgcgtggacgacctgtgccgcggctacgacctcacgcgactgtcatacgggcgcagcatcttcacggaacacgtgttaggcttcgagctggtgccaccgtctctctttaacgtggtggtggccatacgcaacgaagccacgcgtaccaaccgcgccgtgcgtctgcccgtgagcaccgctgccgcgcccgagggcatcacgctcttttacggcctgtacaacgcagtgaaggaattctgcctgcgtcaccagctggacccgccgctgctacgccacctagataaatactacgccggactgccgcccgagctgaagcagacgcgcgtcaacctgccggctcactcgcgctatggccctcaagcagtggatgctcgcgattacaaggacgatgacgataagtgatgataataggctggagcctcggtggccatgcttcttgccccttgggcctccccccagcccctcctccccttcctgcacccgtacccccgtggtctttgaataaagtctgagtgggcggc

SEQ ID NO: 228 - DNA, 2932 bp, Artificial Sequence
  Synthetic nucleotide sequence
tcaagcttttggaccctcgtacagaagctaatacgactcactatagggaaataagagagaaaagaagagtaagaagaaatataagagccaccatggaatccaggatctggtgcctggtagtctgcgttaacttgtgtatcgtctgtctgggtgctgcggtttcctcatcttctactcgtggaacttctgctactcacagtcaccattcctctcatacgacgtctgctgctcactctcgatccggttcagtctctcaacgcgtaacttcttcccaaacggtcagccatggtgttaacgagaccatctacaacactaccctcaagtacggagatgtggtgggggtcaataccaccaagtacccctatcgcgtgtgttctatggcccagggtacggatcttattcgctttgaacgtaatatcgtctgcacctcgatgaagcccatcaatgaagacctggacgagggcatcatggtggtctacaaacgcaacatcgtcgcgcacacctttaaggtacgagtctaccagaaggttttgacgtttcgtcgtagctacgcttacatccacaccacttatctgctgggcagcaacacggaatacgtggcgcctcctatgtgggagattcatcatatcaacagccacagtcagtgctacagttcctacagccgcgttatagcaggcacggttttcgtggcttatcatagggacagctatgaaaacaaaaccatgcaattaatgcccgacgattattccaacacccacagtacccgttacgtgacggtcaaggatcaatggcacagccgcggcagcacctggctctatcgtgagacctgtaatctgaattgtatggtgaccatcactactgcgcgctccaaatatccttatcattttttcgccacttccacgggtgacgtggttgacatttctcctttctacaacggaaccaatcgcaatgccagctactttggagaaaacgccgacaagtttttcatttttccgaactacactatcgtctccgactttggaagaccgaattctgcgttagagacccacaggttggtggcttttcttgaacgtgcggactcggtgatctcctgggatatacaggacgaaaagaatgtcacttgtcaactcactttctgggaagcctcggaacgcaccattcgttccgaagccgaggactcgtatcacttttcttctgccaaaatgaccgccactttcttatctaagaagcaagaggtgaacatgtccgactctgcgctggactgcgtacgtgatgaggctataaataagttacagcagattttcaatacttcatacaatcaaacatatgaaaaatatggaaacgtgtccgtctttgaaaccactggtggtttggtagtgttctggcaaggtatcaagcaaaaatctctggtggaactcgaacgtttggccaaccgctccagtctgaatcttactcataatagaaccaaaagaagtacagatggcaacaatgcaactcatttatccaacatggaatcggtgcacaatctggtctacgcccagctgcagttcacctatgacacgttgcgcggttacatcaaccgggcgctggcgcaaatcgcagaagcctggtgtgtggatcaacggcgcaccctagaggtcttcaaggaactcagcaagatcaacccgtcagccattctctcggccatttacaacaaaccgattgccgcgcgtttcatgggtgatgtcttgggcctggccagctgcgtgaccatcaaccaaaccagcgtcaaggtgctgcgtgatatgaacgtgaaggagtcgccaggacgctgctactcacgacccgtggtcatctttaatttcgccaacagctcgtacgtgcagtacggtcaactgggcgaggacaacgaaatcctgttgggcaaccaccgcactgaggaatgtcagcttcccagcctcaagatcttcatcgccgggaactcggcctacgagtacgtggactacctcttcaaacgcatgattgacctcagcagtatctccaccgtcgacagcatgatcgccctggatatcgacccgctggaaaataccgacttcagggtactggaactttactcgcagaaagagctgcgttccagcaacgtttttgacctcgaagagatcatgcgcgaattcaactcgtacaagcagcgggtaaagtacgtggaggacaaggtagtcgacccgctaccgccctacctcaagggtctggacgacctcatgagcggcctgggcgccgcgggaaaggccgttggcgtagccattggggccgtgggtggcgcggtggcctccgtggtcgaaggcgttgccaccttcctcaaaaaccccttcggagcgttcaccatcatcctcgtggccatagctgtagtcattatcacttatttgatctatactcgacagcggcgtttgtgcacgcagccgctgcagaacctctttccctatctggtgtccgccgacgggaccaccgtgacgtcgggcagcaccaaagacacgtcgttacaggctccgccttcctacgaggaaagtgtttataattctggtcgcaaaggaccgggaccaccgtcgtctgatgcatccacggcggctccgccttacaccaacgagcaggcttaccagatgcttctggccctggcccgtctggacgcagagcagcgagcgcagcagaacggtacagattctttggacggacggactggcacgcaggacaagggacagaagcccaacctactagaccgactgcgacatcgcaaaaacggctaccgacacttgaaagactctgacgaagaagagaacgtctgataataggctggagcctcggtggccatgcttcttgccccttgggcctccccccagcccctcctccccttcctgcacccgtacccccgtggtctttgaataaagtctgagtgggcggc

SEQ ID NO: 229 - DNA, 2956 bp, Artificial Sequence
  Synthetic nucleotide sequence
tcaagcttttggaccctcgtacagaagctaatacgactcactatagggaaataagagagaaaagaagagtaagaagaaatataagagccaccatggaatccaggatctggtgcctggtagtctgcgttaacttgtgtatcgtctgtctgggtgctgcggtttcctcatcttctactcgtggaacttctgctactcacagtcaccattcctctcatacgacgtctgctgctcactctcgatccggttcagtctctcaacgcgtaacttcttcccaaacggtcagccatggtgttaacgagaccatctacaacactaccctcaagtacggagatgtggtgggggtcaataccaccaagtacccctatcgcgtgtgttctatggcccagggtacggatcttattcgctttgaacgtaatatcgtctgcacctcgatgaagcccatcaatgaagacctggacgagggcatcatggtggtctacaaacgcaacatcgtcgcgcacacctttaaggtacgagtctaccagaaggttttgacgtttcgtcgtagctacgcttacatccacaccacttatctgctgggcagcaacacggaatacgtggcgcctcctatgtgggagattcatcatatcaacagccacagtcagtgctacagttcctacagccgcgttatagcaggcacggttttcgtggcttatcatagggacagctatgaaaacaaaaccatgcaattaatgcccgacgattattccaacacccacagtacccgttacgtgacggtcaaggatcaatggcacagccgcggcagcacctggctctatcgtgagacctgtaatctgaattgtatggtgaccatcactactgcgcgctccaaatatccttatcattttttcgccacttccacgggtgacgtggttgacatttctcctttctacaacggaaccaatcgcaatgccagctactttggagaaaacgccgacaagtttttcatttttccgaactacactatcgtctccgactttggaagaccgaattctgcgttagagacccacaggttggtggcttttcttgaacgtgcggactcggtgatctcctgggatatacaggacgaaaagaatgtcacttgtcaactcactttctgggaagcctcggaacgcaccattcgttccgaagccgaggactcgtatcacttttcttctgccaaaatgaccgccactttcttatctaagaagcaagaggtgaacatgtccgactctgcgctggactgcgtacgtgatgaggctataaataagttacagcagattttcaatacttcatacaatcaaacatatgaaaaatatggaaacgtgtccgtctttgaaaccactggtggtttggtagtgttctggcaaggtatcaagcaaaaatctctggtggaactcgaacgtttggccaaccgctccagtctgaatcttactcataatagaaccaaaagaagtacagatggcaacaatgcaactcatttatccaacatggaatcggtgcacaatctggtctacgcccagctgcagttcacctatgacacgttgcgcggttacatcaaccgggcgctggcgcaaatcgcagaagcctggtgtgtggatcaacggcgcaccctagaggtcttcaaggaactcagcaagatcaacccgtcagccattctctcggccatttacaacaaaccgattgccgcgcgtttcatgggtgatgtcttgggcctggccagctgcgtgaccatcaaccaaaccagcgtcaaggtgctgcgtgatatgaacgtgaaggagtcgccaggacgctgctactcacgacccgtggtcatctttaatttcgccaacagctcgtacgtgcagtacggtcaactgggcgaggacaacgaaatcctgttgggcaaccaccgcactgaggaatgtcagcttcccagcctcaagatcttcatcgccgggaactcggcctacgagtacgtggactacctcttcaaacgcatgattgacctcagcagtatctccaccgtcgacagcatgatcgccctggatatcgacccgctggaaaataccgacttcagggtactggaactttactcgcagaaagagctgcgttccagcaacgtttttgacctcgaagagatcatgcgcgaattcaactcgtacaagcagcgggtaaagtacgtggaggacaaggtagtcgacccgctaccgccctacctcaagggtctggacgacctcatgagcggcctgggcgccgcgggaaaggccgttggcgtagccattggggccgtgggtggcgcggtggcctccgtggtcgaaggcgttgccaccttcctcaaaaaccccttcggagcgttcaccatcatcctcgtggccatagctgtagtcattatcacttatttgatctatactcgacagcggcgtttgtgcacgcagccgctgcagaacctctttccctatctggtgtccgccgacgggaccaccgtgacgtcgggcagcaccaaagacacgtcgttacaggctccgccttcctacgaggaaagtgtttataattctggtcgcaaaggaccgggaccaccgtcgtctgatgcatccacggcggctccgccttacaccaacgagcaggcttaccagatgcttctggccctggcccgtctggacgcagagcagcgagcgcagcagaacggtacagattctttggacggacggactggcacgcaggacaagggacagaagcccaacctactagaccgactgcgacatcgcaaaaacggctaccgacacttgaaagactctgacgaagaagagaacgtcgattacaaggacgatgacgataagtgataataggctggagcctcggtggccatgcttcttgccccttgggcctccccccagcccctcctccccttcctgcacccgtacccccgtggtctttgaataaagtctgagtgggcggc

SEQ ID NO: 230 - DNA, 2356 bp, Artificial Sequence
  Synthetic nucleotide sequence
tcaagcttttggaccctcgtacagaagctaatacgactcactatagggaaataagagagaaaagaagagtaagaagaaatataagagccaccatgcggccaggcctcccctcctacctcatcatcctcgccgtctgtctcttcagccacctactttcgtcacgatatggcgcagaagccgtatccgaaccgctggacaaagcgtttcacctactgctcaacacctacgggagacccatccgcttcctgcgtgaaaataccacccagtgtacctacaacagcagcctccgtaacagcacggtcgtcagggaaaacgccatcagtttcaactttttccaaagctataatcaatactatgtattccatatgcctcgatgtctttttgcgggtcctctggcggagcagtttctgaaccaggtagatctgaccgaaaccctggaaagataccaacagagacttaacacttacgcgctggtatccaaagacctggccagctaccgatctttttcgcagcagctaaaggcacaagacagcctaggtgaacagcccaccactgtgccaccgcccattgacctgtcaatacctcacgtttggatgccaccgcaaaccactccacacggctggacagaatcacataccacctcaggactacaccgaccacactttaaccagacctgtatcctctttgatggacacgatctactattcagcaccgtcacaccttgtttgcaccaaggcttttacctcatcgacgaactacgttacgttaaaataacactgaccgaggacttcttcgtagttacggtgtccatagacgacgacacacccatgctgcttatcttcggccatcttccacgcgtacttttcaaagcgccctatcaacgcgacaactttatactacgacaaactgaaaaacacgagctcctggtgctagttaagaaagatcaactgaaccgtcactcttatctcaaagacccggactttcttgacgccgcacttgacttcaactacctagacctcagcgcactactacgtaacagctttcaccgttacgccgtggatgtactcaagagcggtcgatgtcagatgctggaccgccgcacggtagaaatggccttcgcctacgcattagcactgttcgcagcagcccgacaagaagaggccggcgcccaagtctccgtcccacgggccctagaccgccaggccgcactcttacaaatacaagaatttatgatcacctgcctctcacaaacaccaccacgcaccacgttgctgctgtatcccacggccgtggacctggccaaacgagccctttggacaccgaatcagatcaccgacatcaccagcctcgtacgcctggtctacatactctctaaacagaatcagcaacatctcatcccccaatgggcactacgacagatcgccgactttgccctaaaactacacaaaacgcacctggcctcttttctttcagccttcgcacgccaagaactctacctcatgggcagcctcgtccactccatgctggtacatacgacggagagacgcgaaatcttcatcgtagaaacgggcctctgttcattggccgagctatcacactttacgcagttgttagctcatccacaccacgaatacctcagcgacctgtacacaccctgttccagtagcgggcgacgcgatcactcgctcgaacgcctcacgcgtctcttccccgatgccaccgtccccgctaccgttcccgccgccctctccatcctatctaccatgcaaccaagcacgctggaaaccttccccgacctgttttgcttgccgctcggcgaatccttctccgcgctgaccgtctccgaacacgtcagttatatcgtaacaaaccagtacctgatcaaaggtatctcctaccctgtctccaccaccgtcgtaggccagagcctcatcatcacccagacggacagtcaaactaaatgcgaactgacgcgcaacatgcataccacacacagcatcacagtggcgctcaacatttcgctagaaaactgcgccttttgccaaagcgccctgctagaatacgacgacacgcaaggcgtcatcaacatcatgtacatgcacgactcggacgacgtccttttcgccctggatccctacaacgaagtggtggtctcatctccgcgaactcactacctcatgcttttgaaaaacggtacggtactagaagtaactgacgtcgtcgtggacgccaccgactgataataggctggagcctcggtggccatgcttcttgccccttgggcctccccccagcccctcctccccttcctgcacccgtacccccgtggtctttgaataaagtctgagtgggcggc

SEQ ID NO: 231 - DNA, 2383 bp, Artificial Sequence
  Synthetic nucleotide sequence
tcaagcttttggaccctcgtacagaagctaatacgactcactatagggaaataagagagaaaagaagagtaagaagaaatataagagccaccatgcggccaggcctcccctcctacctcatcatcctcgccgtctgtctcttcagccacctactttcgtcacgatatggcgcagaagccgtatccgaaccgctggacaaagcgtttcacctactgctcaacacctacgggagacccatccgcttcctgcgtgaaaataccacccagtgtacctacaacagcagcctccgtaacagcacggtcgtcagggaaaacgccatcagtttcaactttttccaaagctataatcaatactatgtattccatatgcctcgatgtctttttgcgggtcctctggcggagcagtttctgaaccaggtagatctgaccgaaaccctggaaagataccaacagagacttaacacttacgcgctggtatccaaagacctggccagctaccgatctttttcgcagcagctaaaggcacaagacagcctaggtgaacagcccaccactgtgccaccgcccattgacctgtcaatacctcacgtttggatgccaccgcaaaccactccacacggctggacagaatcacataccacctcaggactacaccgaccacactttaaccagacctgtatcctctttgatggacacgatctactattcagcaccgtcacaccttgtttgcaccaaggcttttacctcatcgacgaactacgttacgttaaaataacactgaccgaggacttcttcgtagttacggtgtccatagacgacgacacacccatgctgcttatcttcggccatcttccacgcgtacttttcaaagcgccctatcaacgcgacaactttatactacgacaaactgaaaaacacgagctcctggtgctagttaagaaagatcaactgaaccgtcactcttatctcaaagacccggactttcttgacgccgcacttgacttcaactacctagacctcagcgcactactacgtaacagctttcaccgttacgccgtggatgtactcaagagcggtcgatgtcagatgctggaccgccgcacggtagaaatggccttcgcctacgcattagcactgttcgcagcagcccgacaagaagaggccggcgcccaagtctccgtcccacgggccctagaccgccaggccgcactcttacaaatacaagaatttatgatcacctgcctctcacaaacaccaccacgcaccacgttgctgctgtatcccacggccgtggacctggccaaacgagccctttggacaccgaatcagatcaccgacatcaccagcctcgtacgcctggtctacatactctctaaacagaatcagcaacatctcatcccccaatgggcactacgacagatcgccgactttgccctaaaactacacaaaacgcacctggcctcttttctttcagccttcgcacgccaagaactctacctcatgggcagcctcgtccactccatgctggtacatacgacggagagacgcgaaatcttcatcgtagaaacgggcctctgttcattggccgagctatcacactttacgcagttgttagctcatccacaccacgaatacctcagcgacctgtacacaccctgttccagtagcgggcgacgcgatcactcgctcgaacgcctcacgcgtctcttccccgatgccaccgtccccgctaccgttcccgccgccctctccatcctatctaccatgcaaccaagcacgctggaaaccttccccgacctgttttgcttgccgctcggcgaatccttctccgcgctgaccgtctccgaacacgtcagttatatcgtaacaaaccagtacctgatcaaaggtatctcctaccctgtctccaccaccgtcgtaggccagagcctcatcatcacccagacggacagtcaaactaaatgcgaactgacgcgcaacatgcataccacacacagcatcacagtggcgctcaacatttcgctagaaaactgcgccttttgccaaagcgccctgctagaatacgacgacacgcaaggcgtcatcaacatcatgtacatgcacgactcggacgacgtccttttcgccctggatccctacaacgaagtggtggtctcatctccgcgaactcactacctcatgcttttgaaaaacggtacggtactagaagtaactgacgtcgtcgtggacgccaccgacgattacaaggacgatgacgataagtgatgataataggctggagcctcggtggccatgcttcttgccccttgggcctccccccagcccctcctccccttcctgcacccgtacccccgtggtctttgaataaagtctgagtgggcggc

SEQ ID NO: 232 - DNA, 2377 bp, Artificial Sequence
  Synthetic nucleotide sequence
tcaagcttttggaccctcgtacagaagctaatacgactcactatagggaaataagagagaaaagaagagtaagaagaaatataagagccaccatgcggccaggcctcccctcctacctcatcatcctcgccgtctgtctcttcagccacctactttcgtcacgatatggcgcagaagccgtatccgaaccgctggacaaagcgtttcacctactgctcaacacctacgggagacccatccgcttcctgcgtgaaaataccacccagtgtacctacaacagcagcctccgtaacagcacggtcgtcagggaaaacgccatcagtttcaactttttccaaagctataatcaatactatgtattccatatgcctcgatgtctttttgcgggtcctctggcggagcagtttctgaaccaggtagatctgaccgaaaccctggaaagataccaacagagacttaacacttacgcgctggtatccaaagacctggccagctaccgatctttttcgcagcagctaaaggcacaagacagcctaggtgaacagcccaccactgtgccaccgcccattgacctgtcaatacctcacgtttggatgccaccgcaaaccactccacacggctggacagaatcacataccacctcaggactacaccgaccacactttaaccagacctgtatcctctttgatggacacgatctactattcagcaccgtcacaccttgtttgcaccaaggcttttacctcatcgacgaactacgttacgttaaaataacactgaccgaggacttcttcgtagttacggtgtccatagacgacgacacacccatgctgcttatcttcggccatcttccacgcgtacttttcaaagcgccctatcaacgcgacaactttatactacgacaaactgaaaaacacgagctcctggtgctagttaagaaagatcaactgaaccgtcactcttatctcaaagacccggactttcttgacgccgcacttgacttcaactacctagacctcagcgcactactacgtaacagctttcaccgttacgccgtggatgtactcaagagcggtcgatgtcagatgctggaccgccgcacggtagaaatggccttcgcctacgcattagcactgttcgcagcagcccgacaagaagaggccggcgcccaagtctccgtcccacgggccctagaccgccaggccgcactcttacaaatacaagaatttatgatcacctgcctctcacaaacaccaccacgcaccacgttgctgctgtatcccacggccgtggacctggccaaacgagccctttggacaccgaatcagatcaccgacatcaccagcctcgtacgcctggtctacatactctctaaacagaatcagcaacatctcatcccccaatgggcactacgacagatcgccgactttgccctaaaactacacaaaacgcacctggcctcttttctttcagccttcgcacgccaagaactctacctcatgggcagcctcgtccactccatgctggtacatacgacggagagacgcgaaatcttcatcgtagaaacgggcctctgttcattggccgagctatcacactttacgcagttgttagctcatccacaccacgaatacctcagcgacctgtacacaccctgttccagtagcgggcgacgcgatcactcgctcgaacgcctcacgcgtctcttccccgatgccaccgtccccgctaccgttcccgccgccctctccatcctatctaccatgcaaccaagcacgctggaaaccttccccgacctgttttgcttgccgctcggcgaatccttctccgcgctgaccgtctccgaacacgtcagttatatcgtaacaaaccagtacctgatcaaaggtatctcctaccctgtctccaccaccgtcgtaggccagagcctcatcatcacccagacggacagtcaaactaaatgcgaactgacgcgcaacatgcataccacacacagcatcacagtggcgctcaacatttcgctagaaaactgcgccttttgccaaagcgccctgctagaatacgacgacacgcaaggcgtcatcaacatcatgtacatgcacgactcggacgacgtccttttcgccctggatccctacaacgaagtggtggtctcatctccgcgaactcactacctcatgcttttgaaaaacggtacggtactagaagtaactgacgtcgtcgtggacgccaccgaccaccatcaccaccatcactgatgataataggctggagcctcggtggccatgcttcttgccccttgggcctccccccagcccctcctccccttcctgcacccgtacccccgtggtctttgaataaagtctgagtgggcggc

SEQ ID NO: 233 - DNA, 2287 bp, Artificial Sequence
  Synthetic nucleotide sequence
tcaagcttttggaccctcgtacagaagctaatacgactcactatagggaaataagagagaaaagaagagtaagaagaaatataagagccaccatggaatccaggatctggtgcctggtagtctgcgttaacttgtgtatcgtctgtctgggtgctgcggtttcctcatcttctactcgtggaacttctgctactcacagtcaccattcctctcatacgacgtctgctgctcactctcgatccggttcagtctctcaacgcgtaacttcttcccaaacggtcagccatggtgttaacgagaccatctacaacactaccctcaagtacggagatgtggtgggggtcaataccaccaagtacccctatcgcgtgtgttctatggcccagggtacggatcttattcgctttgaacgtaatatcgtctgcacctcgatgaagcccatcaatgaagacctggacgagggcatcatggtggtctacaaacgcaacatcgtcgcgcacacctttaaggtacgagtctaccagaaggttttgacgtttcgtcgtagctacgcttacatccacaccacttatctgctgggcagcaacacggaatacgtggcgcctcctatgtgggagattcatcatatcaacagccacagtcagtgctacagttcctacagccgcgttatagcaggcacggttttcgtggcttatcatagggacagctatgaaaacaaaaccatgcaattaatgcccgacgattattccaacacccacagtacccgttacgtgacggtcaaggatcaatggcacagccgcggcagcacctggctctatcgtgagacctgtaatctgaattgtatggtgaccatcactactgcgcgctccaaatatccttatcattttttcgccacttccacgggtgacgtggttgacatttctcctttctacaacggaaccaatcgcaatgccagctactttggagaaaacgccgacaagtttttcatttttccgaactacactatcgtctccgactttggaagaccgaattctgcgttagagacccacaggttggtggcttttcttgaacgtgcggactcggtgatctcctgggatatacaggacgaaaagaatgtcacttgtcaactcactttctgggaagcctcggaacgcaccattcgttccgaagccgaggactcgtatcacttttcttctgccaaaatgaccgccactttcttatctaagaagcaagaggtgaacatgtccgactctgcgctggactgcgtacgtgatgaggctataaataagttacagcagattttcaatacttcatacaatcaaacatatgaaaaatatggaaacgtgtccgtctttgaaaccactggtggtttggtagtgttctggcaaggtatcaagcaaaaatctctggtggaactcgaacgtttggccaaccgctccagtctgaatcttactcataatagaaccaaaagaagtacagatggcaacaatgcaactcatttatccaacatggaatcggtgcacaatctggtctacgcccagctgcagttcacctatgacacgttgcgcggttacatcaaccgggcgctggcgcaaatcgcagaagcctggtgtgtggatcaacggcgcaccctagaggtcttcaaggaactcagcaagatcaacccgtcagccattctctcggccatttacaacaaaccgattgccgcgcgtttcatgggtgatgtcttgggcctggccagctgcgtgaccatcaaccaaaccagcgtcaaggtgctgcgtgatatgaacgtgaaggagtcgccaggacgctgctactcacgacccgtggtcatctttaatttcgccaacagctcgtacgtgcagtacggtcaactgggcgaggacaacgaaatcctgttgggcaaccaccgcactgaggaatgtcagcttcccagcctcaagatcttcatcgccgggaactcggcctacgagtacgtggactacctcttcaaacgcatgattgacctcagcagtatctccaccgtcgacagcatgatcgccctggatatcgacccgctggaaaataccgacttcagggtactggaactttactcgcagaaagagctgcgttccagcaacgtttttgacctcgaagagatcatgcgcgaattcaactcgtacaagcagtgataataggctggagcctcggtggccatgcttcttgccccttgggcctccccccagcccctcctccccttcctgcacccgtacccccgtggtctttgaataaagtctgagtgggcggc

SEQ ID NO: 234 - DNA, 2311 bp, Artificial Sequence
  Synthetic nucleotide sequence
tcaagcttttggaccctcgtacagaagctaatacgactcactatagggaaataagagagaaaagaagagtaagaagaaatataagagccaccatggaatccaggatctggtgcctggtagtctgcgttaacttgtgtatcgtctgtctgggtgctgcggtttcctcatcttctactcgtggaacttctgctactcacagtcaccattcctctcatacgacgtctgctgctcactctcgatccggttcagtctctcaacgcgtaacttcttcccaaacggtcagccatggtgttaacgagaccatctacaacactaccctcaagtacggagatgtggtgggggtcaataccaccaagtacccctatcgcgtgtgttctatggcccagggtacggatcttattcgctttgaacgtaatatcgtctgcacctcgatgaagcccatcaatgaagacctggacgagggcatcatggtggtctacaaacgcaacatcgtcgcgcacacctttaaggtacgagtctaccagaaggttttgacgtttcgtcgtagctacgcttacatccacaccacttatctgctgggcagcaacacggaatacgtggcgcctcctatgtgggagattcatcatatcaacagccacagtcagtgctacagttcctacagccgcgttatagcaggcacggttttcgtggcttatcatagggacagctatgaaaacaaaaccatgcaattaatgcccgacgattattccaacacccacagtacccgttacgtgacggtcaaggatcaatggcacagccgcggcagcacctggctctatcgtgagacctgtaatctgaattgtatggtgaccatcactactgcgcgctccaaatatccttatcattttttcgccacttccacgggtgacgtggttgacatttctcctttctacaacggaaccaatcgcaatgccagctactttggagaaaacgccgacaagtttttcatttttccgaactacactatcgtctccgactttggaagaccgaattctgcgttagagacccacaggttggtggcttttcttgaacgtgcggactcggtgatctcctgggatatacaggacgaaaagaatgtcacttgtcaactcactttctgggaagcctcggaacgcaccattcgttccgaagccgaggactcgtatcacttttcttctgccaaaatgaccgccactttcttatctaagaagcaagaggtgaacatgtccgactctgcgctggactgcgtacgtgatgaggctataaataagttacagcagattttcaatacttcatacaatcaaacatatgaaaaatatggaaacgtgtccgtctttgaaaccactggtggtttggtagtgttctggcaaggtatcaagcaaaaatctctggtggaactcgaacgtttggccaaccgctccagtctgaatcttactcataatagaaccaaaagaagtacagatggcaacaatgcaactcatttatccaacatggaatcggtgcacaatctggtctacgcccagctgcagttcacctatgacacgttgcgcggttacatcaaccgggcgctggcgcaaatcgcagaagcctggtgtgtggatcaacggcgcaccctagaggtcttcaaggaactcagcaagatcaacccgtcagccattctctcggccatttacaacaaaccgattgccgcgcgtttcatgggtgatgtcttgggcctggccagctgcgtgaccatcaaccaaaccagcgtcaaggtgctgcgtgatatgaacgtgaaggagtcgccaggacgctgctactcacgacccgtggtcatctttaatttcgccaacagctcgtacgtgcagtacggtcaactgggcgaggacaacgaaatcctgttgggcaaccaccgcactgaggaatgtcagcttcccagcctcaagatcttcatcgccgggaactcggcctacgagtacgtggactacctcttcaaacgcatgattgacctcagcagtatctccaccgtcgacagcatgatcgccctggatatcgacccgctggaaaataccgacttcagggtactggaactttactcgcagaaagagctgcgttccagcaacgtttttgacctcgaagagatcatgcgcgaattcaactcgtacaagcaggattacaaggacgatgacgataagtgataataggctggagcctcggtggccatgcttcttgccccttgggcctccccccagcccctcctccccttcctgcacccgtacccccgtggtctttgaataaagtctgagtgggcggc

SEQ ID NO: 235 - DNA, 2305 bp, Artificial Sequence
  Synthetic nucleotide sequence
tcaagcttttggaccctcgtacagaagctaatacgactcactatagggaaataagagagaaaagaagagtaagaagaaatataagagccaccatggaatccaggatctggtgcctggtagtctgcgttaacttgtgtatcgtctgtctgggtgctgcggtttcctcatcttctactcgtggaacttctgctactcacagtcaccattcctctcatacgacgtctgctgctcactctcgatccggttcagtctctcaacgcgtaacttcttcccaaacggtcagccatggtgttaacgagaccatctacaacactaccctcaagtacggagatgtggtgggggtcaataccaccaagtacccctatcgcgtgtgttctatggcccagggtacggatcttattcgctttgaacgtaatatcgtctgcacctcgatgaagcccatcaatgaagacctggacgagggcatcatggtggtctacaaacgcaacatcgtcgcgcacacctttaaggtacgagtctaccagaaggttttgacgtttcgtcgtagctacgcttacatccacaccacttatctgctgggcagcaacacggaatacgtggcgcctcctatgtgggagattcatcatatcaacagccacagtcagtgctacagttcctacagccgcgttatagcaggcacggttttcgtggcttatcatagggacagctatgaaaacaaaaccatgcaattaatgcccgacgattattccaacacccacagtacccgttacgtgacggtcaaggatcaatggcacagccgcggcagcacctggctctatcgtgagacctgtaatctgaattgtatggtgaccatcactactgcgcgctccaaatatccttatcattttttcgccacttccacgggtgacgtggttgacatttctcctttctacaacggaaccaatcgcaatgccagctactttggagaaaacgccgacaagtttttcatttttccgaactacactatcgtctccgactttggaagaccgaattctgcgttagagacccacaggttggtggcttttcttgaacgtgcggactcggtgatctcctgggatatacaggacgaaaagaatgtcacttgtcaactcactttctgggaagcctcggaacgcaccattcgttccgaagccgaggactcgtatcacttttcttctgccaaaatgaccgccactttcttatctaagaagcaagaggtgaacatgtccgactctgcgctggactgcgtacgtgatgaggctataaataagttacagcagattttcaatacttcatacaatcaaacatatgaaaaatatggaaacgtgtccgtctttgaaaccactggtggtttggtagtgttctggcaaggtatcaagcaaaaatctctggtggaactcgaacgtttggccaaccgctccagtctgaatcttactcataatagaaccaaaagaagtacagatggcaacaatgcaactcatttatccaacatggaatcggtgcacaatctggtctacgcccagctgcagttcacctatgacacgttgcgcggttacatcaaccgggcgctggcgcaaatcgcagaagcctggtgtgtggatcaacggcgcaccctagaggtcttcaaggaactcagcaagatcaacccgtcagccattctctcggccatttacaacaaaccgattgccgcgcgtttcatgggtgatgtcttgggcctggccagctgcgtgaccatcaaccaaaccagcgtcaaggtgctgcgtgatatgaacgtgaaggagtcgccaggacgctgctactcacgacccgtggtcatctttaatttcgccaacagctcgtacgtgcagtacggtcaactgggcgaggacaacgaaatcctgttgggcaaccaccgcactgaggaatgtcagcttcccagcctcaagatcttcatcgccgggaactcggcctacgagtacgtggactacctcttcaaacgcatgattgacctcagcagtatctccaccgtcgacagcatgatcgccctggatatcgacccgctggaaaataccgacttcagggtactggaactttactcgcagaaagagctgcgttccagcaacgtttttgacctcgaagagatcatgcgcgaattcaactcgtacaagcagcaccatcaccaccatcactgataataggctggagcctcggtggccatgcttcttgccccttgggcctccccccagcccctcctccccttcctgcacccgtacccccgtggtctttgaataaagtctgagtgggcggc

SEQ ID NO: 236 - DNA, 724 bp, Artificial Sequence; identical to SEQ ID NO: 143
  Synthetic nucleotide sequence

SEQ ID NO: 237 - DNA, 748 bp, Artificial Sequence
  Synthetic nucleotide sequence
tcaagcttttggaccctcgtacagaagctaatacgactcactatagggaaataagagagaaaagaagagtaagaagaaatataagagccaccatgagtcccaaagatctgacgccgttcttgacggcgttgtggctgctattgggtcacagccgcgtgccgcgggtgcgcgcagaagaatgttgcgaattcataaacgtcaaccacccgccggaacgctgttacgatttcaaaatgtgcaatcgcttcaccgtcgcgctgcggtgtccggacggcgaagtctgctacagtcccgagaaaacggctgagattcgcgggatcgtcaccaccatgacccattcattgacacgccaggtcgtacacaacaaactgacgagctgcaactacaatccgttatacctcgaagctgacgggcgaatacgctgcggcaaagtaaacgacaaggcgcagtacctgctgggcgccgctggcagcgttccctatcgatggatcaatctggaatacgacaagataacccggatcgtgggcctggatcagtacctggagagcgttaagaaacacaaacggctggatgtgtgccgcgctaaaatgggctatatgctgcaggattacaaggacgatgacgataagtgataataggctggagcctcggtggccatgcttcttgccccttgggcctccccccagcccctcctccccttcctgcacccgtacccccgtggtctttgaataaagtctgagtgggcggc

SEQ ID NO: 238 - DNA, 853 bp, Artificial Sequence
  Synthetic nucleotide sequence
tcaagcttttggaccctcgtacagaagctaatacgactcactatagggaaataagagagaaaagaagagtaagaagaaatataagagccaccatgctgcggcttctgcttcgtcaccactttcactgcctgcttctgtgcgcggtttgggcaacgccctgtctggcgtctccgtggtcgacgctaacagcaaaccagaatccgtccccgccatggtctaaactgacgtattccaaaccgcatgacgcggcgacgttttactgtccttttctctatccctcgcccccacgatcccccttgcaattctcggggttccagcgggtatcaacgggtcccgagtgtcgcaacgagaccctgtatctgctgtacaaccgggaaggccagaccttggtggagagaagctccacctgggtgaaaaaggtgatctggtacctgagcggtcggaaccaaaccatcctccaacggatgccccgaacggcttcgaaaccgagcgacggaaacgtgcagatcagcgtggaagacgccaagatttttggagcgcacatggtgcccaagcagaccaagctgctacgcttcgtcgtcaacgatggcacacgttatcagatgtgtgtgatgaagctggagagctgggctcacgtcttccgggactacagcgtgtcttttcaggtgcgattgacgttcaccgaggccaataaccagacttacaccttctgcacccatcccaatctcatcgtttgataataggctggagcctcggtggccatgcttcttgccccttgggcctccccccagcccctcctccccttcctgcacccgtacccccgtggtctttgaataaagtctgagtgggcggc

SEQ ID NO: 239 - DNA, 880 bp, Artificial Sequence
  Synthetic nucleotide sequence
tcaagcttttggaccctcgtacagaagctaatacgactcactatagggaaataagagagaaaagaagagtaagaagaaatataagagccaccatgctgcggcttctgcttcgtcaccactttcactgcctgcttctgtgcgcggtttgggcaacgccctgtctggcgtctccgtggtcgacgctaacagcaaaccagaatccgtccccgccatggtctaaactgacgtattccaaaccgcatgacgcggcgacgttttactgtccttttctctatccctcgcccccacgatcccccttgcaattctcggggttccagcgggtatcaacgggtcccgagtgtcgcaacgagaccctgtatctgctgtacaaccgggaaggccagaccttggtggagagaagctccacctgggtgaaaaaggtgatctggtacctgagcggtcggaaccaaaccatcctccaacggatgccccgaacggcttcgaaaccgagcgacggaaacgtgcagatcagcgtggaagacgccaagatttttggagcgcacatggtgcccaagcagaccaagctgctacgcttcgtcgtcaacgatggcacacgttatcagatgtgtgtgatgaagctggagagctgggctcacgtcttccgggactacagcgtgtcttttcaggtgcgattgacgttcaccgaggccaataaccagacttacaccttctgcacccatcccaatctcatcgttgattacaaggacgatgacgataagtgatgataataggctggagcctcggtggccatgcttcttgccccttgggcctccccccagcccctcctccccttcctgcacccgtacccccgtggtctttgaataaagtctgagtgggcggc

SEQ ID NO: 240 - DNA, 598 bp, Artificial Sequence
  Synthetic nucleotide sequence
tcaagcttttggaccctcgtacagaagctaatacgactcactatagggaaataagagagaaaagaagagtaagaagaaatataagagccaccatgcggctgtgtcgggtgtggctgtctgtttgtctgtgcgccgtggtgctgggtcagtgccagcgggaaaccgcggaaaaaaacgattattaccgagtaccgcattactgggacgcgtgctctcgcgcgctgcccgaccaaacccgttacaagtatgtggaacagctcgtggacctcacgttgaactaccactacgatgcgagccacggcttggacaactttgacgtgctcaagagaatcaacgtgaccgaggtgtcgttgctcatcagcgactttagacgtcagaaccgtcgcggcggcaccaacaaaaggaccacgttcaacgccgccggttcgctggcgccacacgcccggagcctcgagttcagcgtgcggctctttgccaactgataataggctggagcctcggtggccatgcttcttgccccttgggcctccccccagcccctcctccccttcctgcacccgtacccccgtggtctttgaataaagtctgagtgggcggc

SEQ ID NO: 241 - DNA, 625 bp, Artificial Sequence
  Synthetic nucleotide sequence
tcaagcttttggaccctcgtacagaagctaatacgactcactatagggaaataagagagaaaagaagagtaagaagaaatataagagccaccatgcggctgtgtcgggtgtggctgtctgtttgtctgtgcgccgtggtgctgggtcagtgccagcgggaaaccgcggaaaaaaacgattattaccgagtaccgcattactgggacgcgtgctctcgcgcgctgcccgaccaaacccgttacaagtatgtggaacagctcgtggacctcacgttgaactaccactacgatgcgagccacggcttggacaactttgacgtgctcaagagaatcaacgtgaccgaggtgtcgttgctcatcagcgactttagacgtcagaaccgtcgcggcggcaccaacaaaaggaccacgttcaacgccgccggttcgctggcgccacacgcccggagcctcgagttcagcgtgcggctctttgccaacgattacaaggacgatgacgataagtgatgataataggctggagcctcggtggccatgcttcttgccccttgggcctccccccagcccctcctccccttcctgcacccgtacccccgtggtctttgaataaagtctgagtgggcggc

SEQ ID NO: 242 - DNA, 2434 bp, Artificial Sequence
  Synthetic nucleotide sequence
tcaagcttttggaccctcgtacagaagctaatacgactcactatagggacagacgagagagaagcacgccaattctgcctgcttaagccatgcggccaggcctcccctcctacctcatcatcctcgccgtctgtctcttcagccacctactttcgtcacgatatggcgcagaagccgtatccgaaccgctggacaaagcgtttcacctactgctcaacacctacgggagacccatccgcttcctgcgtgaaaataccacccagtgtacctacaacagcagcctccgtaacagcacggtcgtcagggaaaacgccatcagtttcaactttttccaaagctataatcaatactatgtattccatatgcctcgatgtctttttgcgggtcctctggcggagcagtttctgaaccaggtagatctgaccgaaaccctggaaagataccaacagagacttaacacttacgcgctggtatccaaagacctggccagctaccgatctttttcgcagcagctaaaggcacaagacagcctaggtgaacagcccaccactgtgccaccgcccattgacctgtcaatacctcacgtttggatgccaccgcaaaccactccacacggctggacagaatcacataccacctcaggactacaccgaccacactttaaccagacctgtatcctctttgatggacacgatctactattcagcaccgtcacaccttgtttgcaccaaggcttttacctcatcgacgaactacgttacgttaaaataacactgaccgaggacttcttcgtagttacggtgtccatagacgacgacacacccatgctgcttatcttcggccatcttccacgcgtacttttcaaagcgccctatcaacgcgacaactttatactacgacaaactgaaaaacacgagctcctggtgctagttaagaaagatcaactgaaccgtcactcttatctcaaagacccggactttcttgacgccgcacttgacttcaactacctagacctcagcgcactactacgtaacagctttcaccgttacgccgtggatgtactcaagagcggtcgatgtcagatgctggaccgccgcacggtagaaatggccttcgcctacgcattagcactgttcgcagcagcccgacaagaagaggccggcgcccaagtctccgtcccacgggccctagaccgccaggccgcactcttacaaatacaagaatttatgatcacctgcctctcacaaacaccaccacgcaccacgttgctgctgtatcccacggccgtggacctggccaaacgagccctttggacaccgaatcagatcaccgacatcaccagcctcgtacgcctggtctacatactctctaaacagaatcagcaacatctcatcccccaatgggcactacgacagatcgccgactttgccctaaaactacacaaaacgcacctggcctcttttctttcagccttcgcacgccaagaactctacctcatgggcagcctcgtccactccatgctggtacatacgacggagagacgcgaaatcttcatcgtagaaacgggcctctgttcattggccgagctatcacactttacgcagttgttagctcatccacaccacgaatacctcagcgacctgtacacaccctgttccagtagcgggcgacgcgatcactcgctcgaacgcctcacgcgtctcttccccgatgccaccgtccccgctaccgttcccgccgccctctccatcctatctaccatgcaaccaagcacgctggaaaccttccccgacctgttttgcttgccgctcggcgaatccttctccgcgctgaccgtctccgaacacgtcagttatatcgtaacaaaccagtacctgatcaaaggtatctcctaccctgtctccaccaccgtcgtaggccagagcctcatcatcacccagacggacagtcaaactaaatgcgaactgacgcgcaacatgcataccacacacagcatcacagtggcgctcaacatttcgctagaaaactgcgccttttgccaaagcgccctgctagaatacgacgacacgcaaggcgtcatcaacatcatgtacatgcacgactcggacgacgtccttttcgccctggatccctacaacgaagtggtggtctcatctccgcgaactcactacctcatgcttttgaaaaacggtacggtactagaagtaactgacgtcgtcgtggacgccaccgacagtcgtctcctcatgatgtccgtctacgcgctatcggccatcatcggcatctatctgctctaccgcatgctcaagacatgctgataataggctggagcctcggtggccatgcttcttgccccttgggcctccccccagcccctcctccccttcctgcacccgtacccccgtggtctttgaataaagtctgagtgggcggc

SEQ ID NO: 243 - DNA, 1044 bp, Artificial Sequence
  Synthetic nucleotide sequence
tcaagcttttggaccctcgtacagaagctaatacgactcactatagggcttaagcaggcagaattggcccttagcctgtaccagccgaaccatgtgccgccgcccggattgcggcttctctttctcacctggaccggtgatactgctgtggtgttgccttctgctgcccattgtttcctcagccgccgtcagcgtcgctcctaccgccgccgagaaagtccccgcggagtgccccgaactaacgcgccgatgcttgttgggtgaggtgtttgagggtgacaagtatgaaagttggctgcgcccgttggtgaatgttaccgggcgcgatggcccgctatcgcaacttatccgttaccgtcccgttacgccggaggccgccaactccgtgctgttggacgaggctttcctggacactctggccctgctgtacaacaatccggatcaattgcgggccctgctgacgctgttgagctcggacacagcgccgcgctggatgacggtgatgcgcggctacagcgagtgcggcgatggctcgccggccgtgtacacgtgcgtggacgacctgtgccgcggctacgacctcacgcgactgtcatacgggcgcagcatcttcacggaacacgtgttaggcttcgagctggtgccaccgtctctctttaacgtggtggtggccatacgcaacgaagccacgcgtaccaaccgcgccgtgcgtctgcccgtgagcaccgctgccgcgcccgagggcatcacgctcttttacggcctgtacaacgcagtgaaggaattctgcctgcgtcaccagctggacccgccgctgctacgccacctagataaatactacgccggactgccgcccgagctgaagcagacgcgcgtcaacctgccggctcactcgcgctatggccctcaagcagtggatgctcgctgataataggctggagcctcggtggccatgcttcttgccccttgggcctccccccagcccctcctccccttcctgcacccgtacccccgtggtctttgaataaagtctgagtgggcggc

SEQ ID NO: 244 - DNA, 1045 bp, Artificial Sequence
  Synthetic nucleotide sequence
tcaagcttttggaccctcgtacagaagctaatacgactcactatagggtggctcttatatttcttcttactcttcttttctctcttatttccatgtgccgccgcccggattgcggcttctctttctcacctggaccggtgatactgctgtggtgttgccttctgctgcccattgtttcctcagccgccgtcagcgtcgctcctaccgccgccgagaaagtccccgcggagtgccccgaactaacgcgccgatgcttgttgggtgaggtgtttgagggtgacaagtatgaaagttggctgcgcccgttggtgaatgttaccgggcgcgatggcccgctatcgcaacttatccgttaccgtcccgttacgccggaggccgccaactccgtgctgttggacgaggctttcctggacactctggccctgctgtacaacaatccggatcaattgcgggccctgctgacgctgttgagctcggacacagcgccgcgctggatgacggtgatgcgcggctacagcgagtgcggcgatggctcgccggccgtgtacacgtgcgtggacgacctgtgccgcggctacgacctcacgcgactgtcatacgggcgcagcatcttcacggaacacgtgttaggcttcgagctggtgccaccgtctctctttaacgtggtggtggccatacgcaacgaagccacgcgtaccaaccgcgccgtgcgtctgcccgtgagcaccgctgccgcgcccgagggcatcacgctcttttacggcctgtacaacgcagtgaaggaattctgcctgcgtcaccagctggacccgccgctgctacgccacctagataaatactacgccggactgccgcccgagctgaagcagacgcgcgtcaacctgccggctcactcgcgctatggccctcaagcagtggatgctcgctgataataggctggagcctcggtggccatgcttcttgccccttgggcctccccccagcccctcctccccttcctgcacccgtacccccgtggtctttgaataaagtctgagtgggcggc

SEQ ID NO: 245 - DNA, 722 bp, Artificial Sequence
  Synthetic nucleotide sequence
tcaagcttttggaccctcgtacagaagctaatacgactcactatagggttcggctggtacaggctaaccagaagacagataagagcctccatgagtcccaaagatctgacgccgttcttgacggcgttgtggctgctattgggtcacagccgcgtgccgcgggtgcgcgcagaagaatgttgcgaattcataaacgtcaaccacccgccggaacgctgttacgatttcaaaatgtgcaatcgcttcaccgtcgcgctgcggtgtccggacggcgaagtctgctacagtcccgagaaaacggctgagattcgcgggatcgtcaccaccatgacccattcattgacacgccaggtcgtacacaacaaactgacgagctgcaactacaatccgttatacctcgaagctgacgggcgaatacgctgcggcaaagtaaacgacaaggcgcagtacctgctgggcgccgctggcagcgttccctatcgatggatcaatctggaatacgacaagataacccggatcgtgggcctggatcagtacctggagagcgttaagaaacacaaacggctggatgtgtgccgcgctaaaatgggctatatgctgcagtgataataggctggagcctcggtggccatgcttcttgccccttgggcctccccccagcccctcctccccttcctgcacccgtacccccgtggtctttgaataaagtctgagtgggcggc

SEQ ID NO: 246 - DNA, 853 bp, Artificial Sequence
  Synthetic nucleotide sequence
tcaagcttttggaccctcgtacagaagctaatacgactcactatagggtggctcttatatttcttcttagtccgaattcgaagtacggctacatgctgcggcttctgcttcgtcaccactttcactgcctgcttctgtgcgcggtttgggcaacgccctgtctggcgtctccgtggtcgacgctaacagcaaaccagaatccgtccccgccatggtctaaactgacgtattccaaaccgcatgacgcggcgacgttttactgtccttttctctatccctcgcccccacgatcccccttgcaattctcggggttccagcgggtatcaacgggtcccgagtgtcgcaacgagaccctgtatctgctgtacaaccgggaaggccagaccttggtggagagaagctccacctgggtgaaaaaggtgatctggtacctgagcggtcggaaccaaaccatcctccaacggatgccccgaacggcttcgaaaccgagcgacggaaacgtgcagatcagcgtggaagacgccaagatttttggagcgcacatggtgcccaagcagaccaagctgctacgcttcgtcgtcaacgatggcacacgttatcagatgtgtgtgatgaagctggagagctgggctcacgtcttccgggactacagcgtgtcttttcaggtgcgattgacgttcaccgaggccaataaccagacttacaccttctgcacccatcccaatctcatcgtttgataataggctggagcctcggtggccatgcttcttgccccttgggcctccccccagcccctcctccccttcctgcacccgtacccccgtggtctttgaataaagtctgagtgggcggc

SEQ ID NO: 247 - DNA, 853 bp, Artificial Sequence; identical to SEQ ID NO: 246
  Synthetic nucleotide sequence

SEQ ID NO: 248 - DNA, 597 bp, Artificial Sequence
  Synthetic nucleotide sequence
tcaagcttttggaccctcgtacagaagctaatacgactcactatagggtagccgtacttcgaattcggacaagcttctctctcgtctgtccatgcggctgtgtcgggtgtggctgtctgtttgtctgtgcgccgtggtgctgggtcagtgccagcgggaaaccgcggaaaaaaacgattattaccgagtaccgcattactgggacgcgtgctctcgcgcgctgcccgaccaaacccgttacaagtatgtggaacagctcgtggacctcacgttgaactaccactacgatgcgagccacggcttggacaactttgacgtgctcaagagaatcaacgtgaccgaggtgtcgttgctcatcagcgactttagacgtcagaaccgtcgcggcggcaccaacaaaaggaccacgttcaacgccgccggttcgctggcgccacacgcccggagcctcgagttcagcgtgcggctctttgccaactgataataggctggagcctcggtggccatgcttcttgccccttgggcctccccccagcccctcctccccttcctgcacccgtacccccgtggtctttgaataaagtctgagtgggcggc

SEQ ID NO: 249 - DNA, 597 bp, Artificial Sequence
  Synthetic nucleotide sequence
tcaagcttttggaccctcgtacagaagctaatacgactcactatagggtagccgtacttcgaattcggactttcttttctctcttatttccatgcggctgtgtcgggtgtggctgtctgtttgtctgtgcgccgtggtgctgggtcagtgccagcgggaaaccgcggaaaaaaacgattattaccgagtaccgcattactgggacgcgtgctctcgcgcgctgcccgaccaaacccgttacaagtatgtggaacagctcgtggacctcacgttgaactaccactacgatgcgagccacggcttggacaactttgacgtgctcaagagaatcaacgtgaccgaggtgtcgttgctcatcagcgactttagacgtcagaaccgtcgcggcggcaccaacaaaaggaccacgttcaacgccgccggttcgctggcgccacacgcccggagcctcgagttcagcgtgcggctctttgccaactgataataggctggagcctcggtggccatgcttcttgccccttgggcctccccccagcccctcctccccttcctgcacccgtacccccgtggtctttgaataaagtctgagtgggcggc

SEQ ID NO: 250 - DNA, 3364 bp, Artificial Sequence; identical to SEQ ID NO: 148
  Synthetic nucleotide sequence

SEQ ID NO: 251 - DNA, 3388 bp, Artificial Sequence
  Synthetic nucleotide sequence
tcaagcttttggaccctcgtacagaagctaatacgactcactatagggaaataagagagaaaagaagagtaagaagaaatataagagccaccatggagtcgcgcggtcgccgttgtcccgaaatgatatccgtactgggtcccatttcggggcacgtgctgaaagccgtgtttagtcgcggcgatacgccggtgctgccgcacgagacgcgactcctgcagacgggtatccacgtacgcgtgagccagccctcgctgatcctggtgtcgcagtacacgcccgactcgacgccatgccaccgcggcgacaatcagctgcaggtgcagcacacgtactttacgggcagcgaggtggagaacgtgtcggtcaacgtgcacaaccccacgggccgaagcatctgccccagccaagagcccatgtcgatctatgtgtacgcgctgccgctcaagatgctgaacatccccagcatcaacgtgcaccactacccgtcggcggccgagcgcaaacaccgacacctgcccgtagccgacgctgttattcacgcgtcgggcaagcagatgtggcaggcgcgtctcacggtctcgggactggcctggacgcgtcagcagaaccagtggaaagagcccgacgtctactacacgtcagcgttcgtgtttcccaccaaggacgtggcactgcggcacgtggtgtgcgcgcacgagctggtttgctccatggagaacacgcgcgcaaccaagatgcaggtgataggtgaccagtacgtcaaggtgtacctggagtccttctgcgaggacgtgccctccggcaagctctttatgcacgtcacgctgggctctgacgtggaagaggacctaacgatgacccgcaacccgcaacccttcatgcgcccccacgagcgcaacggctttacggtgttgtgtcccaaaaatatgataatcaaaccgggcaagatctcgcacatcatgctggatgtggcttttacctcacacgagcattttgggctgctgtgtcccaagagcatcccgggcctgagcatctcaggtaacctgttgatgaacgggcagcaaatcttcctggaggtacaagcgatacgcgagaccgtggaactgcgtcagtacgatcccgtggctgcgctcttctttttcgatatcgacttgttgctgcagcgcgggcctcagtacagcgagcaccccaccttcaccagccagtatcgcatccagggcaagcttgagtaccgacacacctgggaccggcacgacgagggtgccgcccagggcgacgacgacgtctggaccagcggatcggactccgacgaagaactcgtaaccaccgagcgtaagacgccccgcgtcaccggcggcggcgccatggcgagcgcctccacttccgcgggccgcaaacgcaaatcagcatcctcggcgacggcgtgcacggcgggcgttatgacacgcggccgccttaaggccgagtccaccgtcgcgcccgaagaggacaccgacgaggattccgacaacgaaatccacaatccggccgtgttcacctggccgccctggcaggccggcatcctggcccgcaacctggtgcccatggtggctacggttcagggtcagaatctgaagtaccaggagttcttctgggacgccaacgacatctaccgcatcttcgccgaattggaaggcgtatggcagcccgctgcgcaacccaaacgtcgccgccaccggcaagacgccttgcccgggccatgcatcgcctcgacgcccaaaaagcaccgaggtgagtcctctgccaagagaaagatggaccctgataatcctgacgagggcccttcctccaaggtgccacggcccgagacacccgtgaccaaggccacgacgttcctgcagactatgttaaggaaggaggttaacagtcagctgagcctgggagacccgctgttcccagaattggccgaagaatccctcaaaacctttgaacaagtgaccgaggattgcaacgagaaccccgaaaaagatgtcctgacagaactcgtcaaacagattaaggttcgagtggacatggtgcggcatagaatcaaggagcacatgctgaaaaaatatacccagacggaagaaaaattcactggcgcctttaatatgatgggaggatgtttgcagaatgccttagatatcttagataaggttcatgagcctttcgaggacatgaagtgtattgggctaactatgcagagcatgtatgagaactacattgtacctgaggataagcgggagatgtggatggcttgtattaaggagctgcatgatgtgagcaagggcgccgctaacaagttggggggtgcactgcaggctaaggcccgtgctaaaaaggatgaacttaggagaaagatgatgtatatgtgctacaggaatatagagttctttaccaagaactcagccttccctaagaccaccaatggctgcagtcaggccatggcggcattgcagaacttgcctcagtgctctcctgatgagattatgtcttatgcccagaaaatctttaagattttggatgaggagagagacaaggtgctcacgcacattgatcacatatttatggatatcctcactacatgtgtggaaacaatgtgtaatgagtacaaggtcactagtgacgcttgtatgatgaccatgtacgggggcatctctctcttaagtgagttctgtcgggtgctgtgctgctatgtcttagaggagactagtgtgatgctggccaagcggcctctgataaccaagcctgaggttatcagtgtaatgaagcgccgcattgaggagatctgcatgaaggtctttgcccagtacattctgggggccgatcctttgagagtctgctctcctagtgtggatgacctacgggccatcgccgaggagtcagatgaggaagaggctattgtagcctacactttggccaccgctggtgccagctcctctgattctctggtgtcacctccagagtcccctgtacccgcgactatccctctgtcctcagtaattgtggctgagaacagtgatcaggaagaaagtgaacagagtgatgaggaacaggaggagggtgctcaggaggagcgggaggacactgtgtctgtcaagtctgagccagtgtctgagatagaggaagttgcctcagaggaagaggaggatggtgctgaggaacccaccgcctctggaggcaagagcacccaccctatggtgactagaagcaaggctgaccaggattacaaggacgatgacgataagtgataataggctggagcctcggtggccatgcttcttgccccttgggcctccccccagcccctcctccccttcctgcacccgtacccccgtggtctttgaataaagtctgagtgggcggc

SEQ ID NO: 252 - DNA, 3352 bp, Artificial Sequence
  Synthetic nucleotide sequence
tcaagcttttggaccctcgtacagaagctaatacgactcactatagggaaataagagagaaaagaagagtaagaagaaatataagagccaccatgcggccaggcctcccctcctacctcatcatcctcgccgtctgtctcttcagccacctactttcgtcacgatatggcgcagaagccgtatccgaaccgctggacaaagcgtttcacctactgctcaacacctacgggagacccatccgcttcctgcgtgaaaataccacccagtgtacctacaacagcagcctccgtaacagcacggtcgtcagggaaaacgccatcagtttcaactttttccaaagctataatcaatactatgtattccatatgcctcgatgtctttttgcgggtcctctggcggagcagtttctgaaccaggtagatctgaccgaaaccctggaaagataccaacagagacttaacacttacgcgctggtatccaaagacctggccagctaccgatctttttcgcagcagctaaaggcacaagacagcctaggtgaacagcccaccactgtgccaccgcccattgacctgtcaatacctcacgtttggatgccaccgcaaaccactccacacggctggacagaatcacataccacctcaggactacaccgaccacactttaaccagacctgtatcctctttgatggacacgatctactattcagcaccgtcacaccttgtttgcaccaaggcttttacctcatcgacgaactacgttacgttaaaataacactgaccgaggacttcttcgtagttacggtgtccatagacgacgacacacccatgctgcttatcttcggccatcttccacgcgtacttttcaaagcgccctatcaacgcgacaactttatactacgacaaactgaaaaacacgagctcctggtgctagttaagaaagatcaactgaaccgtcactcttatctcaaagacccggactttcttgacgccgcacttgacttcaactacctagacctcagcgcactactacgtaacagctttcaccgttacgccgtggatgtactcaagagcggtcgatgtcagatgctggaccgccgcacggtagaaatggccttcgcctacgcattagcactgttcgcagcagcccgacaagaagaggccggcgcccaagtctccgtcccacgggccctagaccgccaggccgcactcttacaaatacaagaatttatgatcacctgcctctcacaaacaccaccacgcaccacgttgctgctgtatcccacggccgtggacctggccaaacgagccctttggacaccgaatcagatcaccgacatcaccagcctcgtacgcctggtctacatactctctaaacagaatcagcaacatctcatcccccaatgggcactacgacagatcgccgactttgccctaaaactacacaaaacgcacctggcctcttttctttcagccttcgcacgccaagaactctacctcatgggcagcctcgtccactccatgctggtacatacgacggagagacgcgaaatcttcatcgtagaaacgggcctctgttcattggccgagctatcacactttacgcagttgttagctcatccacaccacgaatacctcagcgacctgtacacaccctgttccagtagcgggcgacgcgatcactcgctcgaacgcctcacgcgtctcttccccgatgccaccgtccccgctaccgttcccgccgccctctccatcctatctaccatgcaaccaagcacgctggaaaccttccccgacctgttttgcttgccgctcggcgaatccttctccgcgctgaccgtctccgaacacgtcagttatatcgtaacaaaccagtacctgatcaaaggtatctcctaccctgtctccaccaccgtcgtaggccagagcctcatcatcacccagacggacagtcaaactaaatgcgaactgacgcgcaacatgcataccacacacagcatcacagtggcgctcaacatttcgctagaaaactgcgccttttgccaaagcgccctgctagaatacgacgacacgcaaggcgtcatcaacatcatgtacatgcacgactcggacgacgtccttttcgccctggatccctacaacgaagtggtggtctcatctccgcgaactcactacctcatgcttttgaaaaacggtacggtactagaagtaactgacgtcgtcgtggacgccaccgacagtcgtctcctcatgatgtccgtctacgcgctatcggccatcatcggcatctatctgctctaccgcatgctcaagacatgccgcgccaagaggagcggaagcggagctactaacttcagcctgctgaagcaggctggagacgtggaggagaaccctggacctatgtgccgccgcccggattgcggcttctctttctcacctggaccggtgatactgctgtggtgttgccttctgctgcccattgtttcctcagccgccgtcagcgtcgctcctaccgccgccgagaaagtccccgcggagtgccccgaactaacgcgccgatgcttgttgggtgaggtgtttgagggtgacaagtatgaaagttggctgcgcccgttggtgaatgttaccgggcgcgatggcccgctatcgcaacttatccgttaccgtcccgttacgccggaggccgccaactccgtgctgttggacgaggctttcctggacactctggccctgctgtacaacaatccggatcaattgcgggccctgctgacgctgttgagctcggacacagcgccgcgctggatgacggtgatgcgcggctacagcgagtgcggcgatggctcgccggccgtgtacacgtgcgtggacgacctgtgccgcggctacgacctcacgcgactgtcatacgggcgcagcatcttcacggaacacgtgttaggcttcgagctggtgccaccgtctctctttaacgtggtggtggccatacgcaacgaagccacgcgtaccaaccgcgccgtgcgtctgcccgtgagcaccgctgccgcgcccgagggcatcacgctcttttacggcctgtacaacgcagtgaaggaattctgcctgcgtcaccagctggacccgccgctgctacgccacctagataaatactacgccggactgccgcccgagctgaagcagacgcgcgtcaacctgccggctcactcgcgctatggccctcaagcagtggatgctcgctgataataggctggagcctcggtggccatgcttcttgccccttgggcctccccccagcccctcctccccttcctgcacccgtacccccgtggtctttgaataaagtctgagtgggcggc

SEQ ID NO: 253 - DNA, 1924 bp, Artificial Sequence
  Synthetic nucleotide sequence
tcaagcttttggaccctcgtacagaagctaatacgactcactatagggaaataagagagaaaagaagagtaagaagaaatataagagccaccatgagtcccaaagatctgacgccgttcttgacggcgttgtggctgctattgggtcacagccgcgtgccgcgggtgcgcgcagaagaatgttgcgaattcataaacgtcaaccacccgccggaacgctgttacgatttcaaaatgtgcaatcgcttcaccgtcgcgctgcggtgtccggacggcgaagtctgctacagtcccgagaaaacggctgagattcgcgggatcgtcaccaccatgacccattcattgacacgccaggtcgtacacaacaaactgacgagctgcaactacaatccgttatacctcgaagctgacgggcgaatacgctgcggcaaagtaaacgacaaggcgcagtacctgctgggcgccgctggcagcgttccctatcgatggatcaatctggaatacgacaagataacccggatcgtgggcctggatcagtacctggagagcgttaagaaacacaaacggctggatgtgtgccgcgctaaaatgggctatatgctgcagcgcgccaagaggagcggaagcggagctactaacttcagcctgctgaagcaggctggagacgtggaggagaaccctggacctatgctgcggcttctgcttcgtcaccactttcactgcctgcttctgtgcgcggtttgggcaacgccctgtctggcgtctccgtggtcgacgctaacagcaaaccagaatccgtccccgccatggtctaaactgacgtattccaaaccgcatgacgcggcgacgttttactgtccttttctctatccctcgcccccacgatcccccttgcaattctcggggttccagcgggtatcaacgggtcccgagtgtcgcaacgagaccctgtatctgctgtacaaccgggaaggccagaccttggtggagagaagctccacctgggtgaaaaaggtgatctggtacctgagcggtcggaaccaaaccatcctccaacggatgccccgaacggcttcgaaaccgagcgacggaaacgtgcagatcagcgtggaagacgccaagatttttggagcgcacatggtgcccaagcagaccaagctgctacgcttcgtcgtcaacgatggcacacgttatcagatgtgtgtgatgaagctggagagctgggctcacgtcttccgggactacagcgtgtcttttcaggtgcgattgacgttcaccgaggccaataaccagacttacaccttctgcacccatcccaatctcatcgttcgcgccaagaggagcggaagcggagtgaaacagactttgaattttgaccttctcaagttggcgggagacgtggagtccaaccctggacctatgcggctgtgtcgggtgtggctgtctgtttgtctgtgcgccgtggtgctgggtcagtgccagcgggaaaccgcggaaaaaaacgattattaccgagtaccgcattactgggacgcgtgctctcgcgcgctgcccgaccaaacccgttacaagtatgtggaacagctcgtggacctcacgttgaactaccactacgatgcgagccacggcttggacaactttgacgtgctcaagagaatcaacgtgaccgaggtgtcgttgctcatcagcgactttagacgtcagaaccgtcgcggcggcaccaacaaaaggaccacgttcaacgccgccggttcgctggcgccacacgcccggagcctcgagttcagcgtgcggctctttgccaactgataataggctggagcctcggtggccatgcttcttgccccttgggcctccccccagcccctcctccccttcctgcacccgtacccccgtggtctttgaataaagtctgagtgggcggc

SEQ ID NO: 254 - DNA, 5146 bp, Artificial Sequence
  Synthetic nucleotide sequence
tcaagcttttggaccctcgtacagaagctaatacgactcactatagggaaataagagagaaaagaagagtaagaagaaatataagagccaccatgcggccaggcctcccctcctacctcatcatcctcgccgtctgtctcttcagccacctactttcgtcacgatatggcgcagaagccgtatccgaaccgctggacaaagcgtttcacctactgctcaacacctacgggagacccatccgcttcctgcgtgaaaataccacccagtgtacctacaacagcagcctccgtaacagcacggtcgtcagggaaaacgccatcagtttcaactttttccaaagctataatcaatactatgtattccatatgcctcgatgtctttttgcgggtcctctggcggagcagtttctgaaccaggtagatctgaccgaaaccctggaaagataccaacagagacttaacacttacgcgctggtatccaaagacctggccagctaccgatctttttcgcagcagctaaaggcacaagacagcctaggtgaacagcccaccactgtgccaccgcccattgacctgtcaatacctcacgtttggatgccaccgcaaaccactccacacggctggacagaatcacataccacctcaggactacaccgaccacactttaaccagacctgtatcctctttgatggacacgatctactattcagcaccgtcacaccttgtttgcaccaaggcttttacctcatcgacgaactacgttacgttaaaataacactgaccgaggacttcttcgtagttacggtgtccatagacgacgacacacccatgctgcttatcttcggccatcttccacgcgtacttttcaaagcgccctatcaacgcgacaactttatactacgacaaactgaaaaacacgagctcctggtgctagttaagaaagatcaactgaaccgtcactcttatctcaaagacccggactttcttgacgccgcacttgacttcaactacctagacctcagcgcactactacgtaacagctttcaccgttacgccgtggatgtactcaagagcggtcgatgtcagatgctggaccgccgcacggtagaaatggccttcgcctacgcattagcactgttcgcagcagcccgacaagaagaggccggcgcccaagtctccgtcccacgggccctagaccgccaggccgcactcttacaaatacaagaatttatgatcacctgcctctcacaaacaccaccacgcaccacgttgctgctgtatcccacggccgtggacctggccaaacgagccctttggacaccgaatcagatcaccgacatcaccagcctcgtacgcctggtctacatactctctaaacagaatcagcaacatctcatcccccaatgggcactacgacagatcgccgactttgccctaaaactacacaaaacgcacctggcctcttttctttcagccttcgcacgccaagaactctacctcatgggcagcctcgtccactccatgctggtacatacgacggagagacgcgaaatcttcatcgtagaaacgggcctctgttcattggccgagctatcacactttacgcagttgttagctcatccacaccacgaatacctcagcgacctgtacacaccctgttccagtagcgggcgacgcgatcactcgctcgaacgcctcacgcgtctcttccccgatgccaccgtccccgctaccgttcccgccgccctctccatcctatctaccatgcaaccaagcacgctggaaaccttccccgacctgttttgcttgccgctcggcgaatccttctccgcgctgaccgtctccgaacacgtcagttatatcgtaacaaaccagtacctgatcaaaggtatctcctaccctgtctccaccaccgtcgtaggccagagcctcatcatcacccagacggacagtcaaactaaatgcgaactgacgcgcaacatgcataccacacacagcatcacagtggcgctcaacatttcgctagaaaactgcgccttttgccaaagcgccctgctagaatacgacgacacgcaaggcgtcatcaacatcatgtacatgcacgactcggacgacgtccttttcgccctggatccctacaacgaagtggtggtctcatctccgcgaactcactacctcatgcttttgaaaaacggtacggtactagaagtaactgacgtcgtcgtggacgccaccgacagtcgtctcctcatgatgtccgtctacgcgctatcggccatcatcggcatctatctgctctaccgcatgctcaagacatgccgcgccaagaggagcggaagcggagctactaacttcagcctgctgaagcaggctggagacgtggaggagaaccctggacctatgtgccgccgcccggattgcggcttctctttctcacctggaccggtgatactgctgtggtgttgccttctgctgcccattgtttcctcagccgccgtcagcgtcgctcctaccgccgccgagaaagtccccgcggagtgccccgaactaacgcgccgatgcttgttgggtgaggtgtttgagggtgacaagtatgaaagttggctgcgcccgttggtgaatgttaccgggcgcgatggcccgctatcgcaacttatccgttaccgtcccgttacgccggaggccgccaactccgtgctgttggacgaggctttcctggacactctggccctgctgtacaacaatccggatcaattgcgggccctgctgacgctgttgagctcggacacagcgccgcgctggatgacggtgatgcgcggctacagcgagtgcggcgatggctcgccggccgtgtacacgtgcgtggacgacctgtgccgcggctacgacctcacgcgactgtcatacgggcgcagcatcttcacggaacacgtgttaggcttcgagctggtgccaccgtctctctttaacgtggtggtggccatacgcaacgaagccacgcgtaccaaccgcgccgtgcgtctgcccgtgagcaccgctgccgcgcccgagggcatcacgctcttttacggcctgtacaacgcagtgaaggaattctgcctgcgtcaccagctggacccgccgctgctacgccacctagataaatactacgccggactgccgcccgagctgaagcagacgcgcgtcaacctgccggctcactcgcgctatggccctcaagcagtggatgctcgccgcgccaagaggagcggaagcggagtgaaacagactttgaattttgaccttctcaagttggcgggagacgtggagtccaaccctggacctatgagtcccaaagatctgacgccgttcttgacggcgttgtggctgctattgggtcacagccgcgtgccgcgggtgcgcgcagaagaatgttgcgaattcataaacgtcaaccacccgccggaacgctgttacgatttcaaaatgtgcaatcgcttcaccgtcgcgctgcggtgtccggacggcgaagtctgctacagtcccgagaaaacggctgagattcgcgggatcgtcaccaccatgacccattcattgacacgccaggtcgtacacaacaaactgacgagctgcaactacaatccgttatacctcgaagctgacgggcgaatacgctgcggcaaagtaaacgacaaggcgcagtacctgctgggcgccgctggcagcgttccctatcgatggatcaatctggaatacgacaagataacccggatcgtgggcctggatcagtacctggagagcgttaagaaacacaaacggctggatgtgtgccgcgctaaaatgggctatatgctgcagcgcgccaagaggagcggaagcggacagtgtactaattatgctctcttgaaattggctggagatgttgagagcaaccctggacctatgctgcggcttctgcttcgtcaccactttcactgcctgcttctgtgcgcggtttgggcaacgccctgtctggcgtctccgtggtcgacgctaacagcaaaccagaatccgtccccgccatggtctaaactgacgtattccaaaccgcatgacgcggcgacgttttactgtccttttctctatccctcgcccccacgatcccccttgcaattctcggggttccagcgggtatcaacgggtcccgagtgtcgcaacgagaccctgtatctgctgtacaaccgggaaggccagaccttggtggagagaagctccacctgggtgaaaaaggtgatctggtacctgagcggtcggaaccaaaccatcctccaacggatgccccgaacggcttcgaaaccgagcgacggaaacgtgcagatcagcgtggaagacgccaagatttttggagcgcacatggtgcccaagcagaccaagctgctacgcttcgtcgtcaacgatggcacacgttatcagatgtgtgtgatgaagctggagagctgggctcacgtcttccgggactacagcgtgtcttttcaggtgcgattgacgttcaccgaggccaataaccagacttacaccttctgcacccatcccaatctcatcgttcgcgccaagaggagcggaagcggagagggcagaggaagtctgctaacatgcggtgacgtcgaggagaatcctggacctatgcggctgtgtcgggtgtggctgtctgtttgtctgtgcgccgtggtgctgggtcagtgccagcgggaaaccgcggaaaaaaacgattattaccgagtaccgcattactgggacgcgtgctctcgcgcgctgcccgaccaaacccgttacaagtatgtggaacagctcgtggacctcacgttgaactaccactacgatgcgagccacggcttggacaactttgacgtgctcaagagaatcaacgtgaccgaggtgtcgttgctcatcagcgactttagacgtcagaaccgtcgcggcggcaccaacaaaaggaccacgttcaacgccgccggttcgctggcgccacacgcccggagcctcgagttcagcgtgcggctctttgccaactgataataggctggagcctcggtggccatgcttcttgccccttgggcctccccccagcccctcctccccttcctgcacccgtacccccgtggtctttgaataaagtctgagtgggcggc

SEQ ID NO: 255 - protein, 31 aa, Artificial Sequence
  Synthetic amino acid sequence
RIKQIEDKIEEILSKQYHIENEIARIKKLIG

SEQ ID NO: 256 - protein, 24 aa, Artificial Sequence
  Synthetic amino acid sequence
KIEEILSKQYHIENEIARIKKLIG

SEQ ID NO: 257 - protein, 17 aa, Artificial Sequence
  Synthetic amino acid sequence
KIYHIENEIARIKKLIG

SEQ ID NO: 258 - protein, 32 aa, Artificial Sequence
  Synthetic amino acid sequence
LSAIGGYIPEAPRDGQAYVRKDGEWVLLSTFL

SEQ ID NO: 259 - protein, 24 aa, Artificial Sequence
  Synthetic amino acid sequence
KIEEILSKQYHIENEIARIKKLIG

SEQ ID NO: 260 - protein, 53 aa, Artificial Sequence
  Synthetic amino acid sequence
MIALDIDPLENTDFRVLELYSQKELRSSNVFDLEEIMREFNSYKQRVKYVEDK

SEQ ID NO: 261 - protein, 50 aa, Artificial Sequence
  Synthetic amino acid sequence
MIALDIDPLENTDFRVLELYSQKELRSSNVFDLEEIMREFNSYKQRVKYV

SEQ ID NO: 262 - protein, 51 aa, Artificial Sequence
  Synthetic amino acid sequence
SMIALDIDPLENTDFRVLELYSQKELRSSNVFDLEEIMREFNSYKQRVKYV

SEQ ID NO: 263 - protein, 17 aa, Artificial Sequence
  Synthetic amino acid sequence
SMIALDIDPLENTDFRV

SEQ ID NO: 264 - protein, 45 aa, Artificial Sequence
  Synthetic amino acid sequence
IDPLENTDFRVLELYSQKELRSSNVFDLEEIMREFNSYKQRVKYV

SEQ ID NO: 265 - protein, 40 aa, Artificial Sequence
  Synthetic amino acid sequence
IDPLENTDFRVLELYSQKELRSSNVFDLEEIMREFNSYKQ

SEQ ID NO: 266 - protein, 28 aa, Artificial Sequence
  Synthetic amino acid sequence
IDPLENTDFRVLELYSQKELRSSNVFDL

SEQ ID NO: 267 - protein, 23 aa, Artificial Sequence
  Synthetic amino acid sequence
IDPLENTDFRVLELYSQKELRSS

SEQ ID NO: 268 - protein, 15 aa, Artificial Sequence
  Synthetic amino acid sequence
IDPLENTDFRVLELY

SEQ ID NO: 269 - protein, 36 aa, Artificial Sequence
  Synthetic amino acid sequence
RVLELYSQKELRSSNVFDLEEIMREFNSYKQRVKYV

SEQ ID NO: 270 - protein, 31 aa, Artificial Sequence
  Synthetic amino acid sequence
RVLELYSQKELRSSNVFDLEEIMREFNSYKQ

SEQ ID NO: 271 - protein, 19 aa, Artificial Sequence
  Synthetic amino acid sequence
RVLELYSQKELRSSNVFDL

SEQ ID NO: 272 - protein, 14 aa, Artificial Sequence
  Synthetic amino acid sequence
RVLELYSQKELRSS

SEQ ID NO: 273 - protein, 15 aa, Artificial Sequence
  Synthetic amino acid sequence
LELYSQKELRSSNVF

SEQ ID NO: 274 - protein, 30 aa, Artificial Sequence
  Synthetic amino acid sequence
SQKELRSSNVFDLEEIMREFNSYKQRVKYV

SEQ ID NO: 275 - protein, 25 aa, Artificial Sequence
  Synthetic amino acid sequence
SQKELRSSNVFDLEEIMREFNSYKQ

SEQ ID NO: 276 - protein, 10 aa, Artificial Sequence
  Synthetic amino acid sequence
SQKELRSSNV

SEQ ID NO: 277 - protein, 19 aa, Artificial Sequence
  Synthetic amino acid sequence
DLEEIMREFNSYKQRVKYV

SEQ ID NO: 278 - protein, 18 aa, Artificial Sequence
  Synthetic amino acid sequence
LEEIMREFNSYKQRVKYV

SEQ ID NO: 279 - protein, 13 aa, Artificial Sequence
  Synthetic amino acid sequence
LEEIMREFNSYKQ

SEQ ID NO: 280 - protein, 8 aa, Artificial Sequence
  Synthetic amino acid sequence
RVKYVEDK

SEQ ID NO: 281 - protein, 56 aa, Artificial Sequence
  Synthetic amino acid sequence
ISTVDSMIALDIDPLENTDFRVLELYSQKELRSSNVFDLEEIMREFNSYKQRVKYV

SEQ ID NO: 282 - protein, 20 aa, Artificial Sequence
  Synthetic amino acid sequence
ISTVDSMIALDIDPLENTDF

SEQ ID NO: 283 - protein, 36 aa, Artificial Sequence
  Synthetic amino acid sequence
QFTYDTLRGYINRALAQIAEAWCVDQRRTLEVFKEL

SEQ ID NO: 284 - protein, 26 aa, Artificial Sequence
  Synthetic amino acid sequence
LRSSNVFDLEEIMREFNSYKQRVKYV

SEQ ID NO: 285 - protein, 6 aa, Artificial Sequence
  Synthetic amino acid sequence
KRNIVA

SEQ ID NO: 286 - protein, 18 aa, Artificial Sequence
  Synthetic amino acid sequence
DDYSNTHSTRYVTVKDQW

SEQ ID NO: 287 - protein, 7 aa, Artificial Sequence
  Synthetic amino acid sequence
ATSTGDV

SEQ ID NO: 288 - protein, 39 aa, Artificial Sequence
  Synthetic amino acid sequence
VYAQLQFTYDTLRGYINRALAQIAEAWCVDQRRTLEVFK

SEQ ID NO: 289 - protein, 15 aa, Artificial Sequence
  Synthetic amino acid sequence
NVFDLEEIMREFNSY
